(19) United States
(12) Patent Application Publication
(10) Pub. No.: US 2010/0150943 A1
(43) Pub. Date: Jun. 17, 2010

(54) IMMUNOGENIC COMPOSITIONS FOR GRAM POSITIVE BACTERIA

(75) Inventors: Guido Grandi, Siena (IT); John Telford, Siena (IT); Marirosa Mora, Siena (IT); Cesira Galeotti, Siena (IT); Daniela Rinaudo, Siena (IT); Andrea Guido Oreste Manetti, Siena (IT)

Correspondence Address: NOVARTIS VACCINES AND DIAGNOSTICS INC., INTELLECTUAL PROPERTY- X100B, P.O. BOX 8097, Emeryville, CA, 94662-8097, US

(73) Assignee: NOVARTIS AG, Basel (CH)

(21) Appl. No.: 12/375,042

(22) PCT Filed: Jul. 26, 2007
(86) PCT No.: PCT/IB07/04695

§ 371 Date: Feb. 3, 2009

Related U.S. Application Data
(60) Provisional application No. 60/833,238, filed on Jul. 26, 2006.

(51) Int. Cl. A61K 39/40; C07K 14/195; A61K 39/116; C12N 1/21; C12P 21/00; A61P 31/04

(52) U.S. Cl. 424/165.1; 530/350; 424/203.1; 435/252.3; 435/69.3; 424/164.1

(57) ABSTRACT

The invention relates to the identification of a new adhesin islands within the genomes of several Gram positive Streptococcus serotypes and isolates. Adhesin island polypeptides of the invention may be used in immunogenic compositions for prophylactic or therapeutic immunization against GAS, GBS, and S. pneumococcal infections.

### FIELD OF THE INVENTION

[0001] The invention relates to the identification of adhesin islands within the genome Streptococcus agalactiae (“GBS”) and the use of adhesin island amino acid sequences encoded by these adhesin islands in compositions for the treatment or prevention of GBS infection. Similar sequences have been identified in other Gram positive bacteria. The invention further includes immunogenic compositions comprising adhesin island amino acid sequences of Gram positive bacteria for the treatment or prevention of infection of Gram positive bacteria. Preferred immunogenic compositions of the invention include an adhesin island surface protein which may be formulated or purified in an oligomeric or pilus form.

### BACKGROUND OF THE INVENTION

[0002] GBS has emerged in the last 20 years as the major cause of neonatal sepsis and meningitis that affects 0.5-3 per 1000 live births, and an important cause of morbidity among older age groups affecting 5-8 per 100,000 of the population. Current disease management strategies rely on intrapartum antibiotics and neonatal monitoring which have reduced neonatal case mortality from >50% in the 1970's to less than 10% in the 1990's. Nevertheless, there is still considerable morbidity and mortality and the management is expensive. 15-35% of pregnant women are asymptomatic carriers and at high risk of transmitting the disease to their babies. Risk of neonatal infection is associated with low serotype specific maternal antibodies and high titers are believed to be protective. In addition, invasive GBS disease is increasingly recognized in elderly adults with underlying disease such as diabetes and cancer.

[0003] The “B” in “GBS” refers to the Lancefield classification, which is based on the antigenicity of a carbohydrate which is soluble in dilute acid and called the C carbohydrate. Lancefield identified 13 types of C carbohydrate, designated A to O, that could be serologically differentiated. The organisms that most commonly infect humans are found in groups A, B, D, and G. Within group B, strains can be divided into at least 9 serotypes (Ia, Ib, Ia/c, II, III, IV, V, VI, VII and VIII) based on the structure of their polysaccharide capsule. In the past, serotypes Ia, Ib, II, and III were equally prevalent in normal vaginal carriage and early onset sepsis in newborns. Type V GBS has emerged as an important cause of GBS infection in the USA, however, and strains of types VI and VIII have become prevalent among Japanese women.

[0004] The genome sequence of a serotype V strain 2603 V/R has been published (See Tettelin et al. (2002) Proc. Natl. Acad. Sci. USA, 2002 Sep. 17; 99(19):12391-6) and various polypeptides for use a vaccine antigens have been identified (WO 02/34771). The vaccines currently in clinical trials, however, are based primarily on polysaccharide antigens. These suffer from serotype-specificity and poor immunogenicity, and so there is a need for effective vaccines against S. agalactiae infection.

[0005] S. agalactiae is classified as a gram positive bacterium, a collection of about 21 genera of bacteria that colonize humans, have a generally spherical shape, a positive Gram stain reaction and lack endospores. Gram positive bacteria are frequent human pathogens and include Staphylococcus (such as S. aureus), Streptococcus (such as S. agalactiae (GBS), S. pyogenes (GAS), S. pneumoniae, S. mutans), Enterococcus (such as E. faecalis and E. faecium), Clostridium (such as C. difficile), Listeria (such as L. monocytogenes) and Corynebacterium (such as C. diphtheria).

[0006] It is an object of the invention to provide further and improved compositions for providing immunity against disease and/or infection of Gram positive bacteria. The compositions are based on the identification of adhesin islands within Streptococcal genomes and the use of amino acid sequences encoded by these islands in therapeutic or prophylactic compositions. The invention further includes compositions comprising immunogenic adhesin island proteins within other Gram positive bacteria in therapeutic or prophylactic compositions.

### SUMMARY OF THE INVENTION

[0007] Applicants have identified a new adhesin island, “GBS Adhesin Island 1,” “AI-1,” “GBS AI-1,” or “PI-1” within the genomes of several Group B Streptococcus serotypes and isolates. This adhesin island is thought to encode surface proteins which are important in the bacteria's virulence. In addition, Applicants have discovered that surface proteins within GBS Adhesin Islands form a previously unseen pilus structure on the surface of GBS bacteria. Amino acid sequences encoded by such GBS Adhesin Islands may be used in immunogenic compositions for the treatment or prevention of GBS infection.

[0008] A preferred immunogenic composition of the invention comprises an AI-1 surface protein, such as GBS 80, which may be formulated or purified in an oligomeric (pilus) form. In a preferred embodiment, the oligomeric form is a hyperoligomer. Electron micrographs depicting some of the first visualizations of this pilus structure in a wild type GBS strain are shown in FIGS. 16, 17, 49, and 50. In addition, Applicants have transformed a GBS strain with a plasmid comprising the AI surface protein

[0009] GBS 80 which resulted in increased production of that AI surface protein. The electron micrographs of this mutant GBS strain in FIGS. 13-15 reveal long, hyper-oligomeric structures comprising GBS 80 which appear to cover portions of the surface of the bacteria and stretch far out into the supernatant. These hyper-oligomeric pilus structures comprising a GBS AI surface protein may be purified or otherwise formulated for use in immunogenic compositions.

[0010] GBS AI-1 comprises a series of approximately five open reading frames encoding for a collection of amino acid sequences comprising surface proteins and sortases (“AI-1 proteins”). Specifically, AI-1 includes polynucleotide sequences encoding for two or more of GBS 80, GBS 104, GBS 52, SAG0647 and SAG0648. One or more of the AI-1 polynucleotide sequences may be replaced by a polynucleotide sequence coding for a fragment of the replaced ORF. Alternatively, one or more of the AI-1 open reading frames may be replaced by a sequence having sequence homology (sequence identity) to the replaced ORF.

[0011] AI-1 typically resides on an approximately 16.1 kb transposon-like element frequently inserted into the open reading frame for trmA. One or more of the AI-1 surface protein sequences typically include an LPXTG motif (e.g., SEQ ID NO:122) or other sortase substrate motif. The AI surface proteins of the invention may affect the ability of the GBS bacteria to adhere to and invade epithelial cells. AI surface proteins may also affect the ability of GBS to translocate through an epithelial cell layer.

[0012] Preferably, one or more AI surface proteins are capable of binding to or otherwise associating with an epithelial cell surface. AI surface proteins may also be able to bind to or associate with fibrinogen, fibronectin, or collagen.

[0013] The sortase proteins are thought to be involved in the secretion and anchoring of the LPXTG containing surface proteins. AI-1 may encode at least one surface protein. Alternatively, AI-1 may encode at least two surface proteins and at least one sortase. Preferably, AI-1 encodes for at least three surface proteins and at least two sortases. One or more of the surface proteins may include an LPXTG motif or other sortase substrate motif.

[0014] The GBS AI-1 protein of the composition may be selected from the group consisting of GBS 80, GBS 104, GBS 52, SAG0647 and SAG0648. GBS AI-1 surface proteins GBS 80 and GBS 104 are preferred for use in the immunogenic compositions of the invention.

[0015] In addition to the open reading frames encoding the AI-1 proteins, AI-1 may also include a divergently transcribed transcriptional regulator such as araC (i.e., the transcriptional regulator is located near or adjacent to the AI protein open reading frames, but it transcribed in the opposite direction). It is believed that araC may regulate the expression of the GBS AI operon. (See Korbel et al., Nature Biotechnology (2004) 22(7): 911-917 for a discussion of divergently transcribed regulators in E. coli).

[0016] A second adhesin island, “Adhesin Island-2,” “AI-2,” “GBS AI-2,” or “PI-2” has also been identified in numerous GBS serotypes. Amino acid sequences encoded by the open reading frames of AI-2 may also be used in immunogenic compositions for the treatment or prevention of GBS infection.

[0017] GBS AI-2 comprises a series of approximately five open reading frames encoding for a collection of amino acid sequences comprising surface proteins and sortases. Specifically, AI-2 includes open reading frames encoding for two or more of GBS 67, GBS 59, GBS 150, SAG1405, SAG1406, 01520, 01521, 01522, 01523, 01523, 01524 and 01525. The GBS AI-2 sequences may be divided into two subgroups. In one embodiment, AI-2 includes open reading frames encoding for two or more of GBS 67, GBS 59, GBS 150, SAG1405, and SAG1406. This collection of open reading frames may be generally referred to as GBS AI-2 subgroup 1 (or PI-2a). Alternatively, AI-2 may include open reading frames encoding for two or more of 01520, 01521, 01522, 01523, 01523, 01524 and 01525. This collection of open reading frames may be generally referred to as GBS AI-2 subgroup 2 (or PI-2b).

[0018] One or more of the AI-2 open reading frame polynucleotide sequences may be replaced by a polynucleotide sequence coding for a fragment of the replaced ORF. Alternatively, one or more of the AI-2 open reading frames may be replaced by a sequence having sequence homology (sequence identity) to the replaced ORF.

[0019] One or more of the AI-2 surface proteins typically include an LPXTG motif (e.g., SEQ ID NO:122) or other sortase substrate motif. These sortase proteins are thought to be involved in the secretion and anchoring of the LPXTG containing surface proteins. AI-2 may encode for at least one surface protein. Alternatively, AI-2 may encode for at least two surface proteins and at least one sortase. Preferably, AI-2 encodes for at least three surface proteins and at least two sortases. One or more of the surface proteins may include an LPXTG motif. The AI-2 protein of the composition may be selected from the group consisting of GBS 67, GBS 59, GBS 150, SAG1405, SAG1406, 01520, 01521, 01522, 01523, 01523, 01524 and 01525. AI-2 surface proteins GBS 67, GBS 59, and 01524 are preferred AI-2 proteins for use in the immunogenic compositions of the invention. GBS 67 or GBS 59 is particularly preferred.

[0020] GBS AI-2 may also include a divergently transcribed transcriptional regulator such as a RofA like protein (for example rogB). As in AI-1, rogB is thought to regulate the expression of the AI-2 operon.

[0021] The GBS AI proteins of the invention may be used in immunogenic compositions for prophylactic or therapeutic immunization against GBS infection. For example, the invention may include an immunogenic composition comprising one or more GBS AI-1 proteins and one or more GBS AI-2 proteins.

[0022] The immunogenic compositions may also be selected to provide protection against an increased range of GBS serotypes and strain isolates. For example, the immunogenic composition may comprise a first and second GBS AI protein, wherein a full length polynucleotide sequence encoding for the first GBS AI protein is not present in a genome comprising a full length polynucleotide sequence encoding for the second GBS AI protein. In addition, each antigen selected for use in the immunogenic compositions will preferably be present in the genomes of multiple GBS serotypes and strain isolates. Preferably, each antigen is present in the genomes of at least two (i.e., 3, 4, 5, 6, 7, 8, 9, 10, or more) GBS strain isolates. More preferably, each antigen is present in the genomes of at least two (i.e., at least 3, 4, 5 or more) GBS serotypes.

[0023] Within GBS AI-1, Applicants have found that Group B Streptococcus surface exposure of GBS 104 is dependent on the concurrent expression of GBS 80. It is thought that GBS 80 is involved in the transport or localization of GBS 104 to the surface of the bacteria. The two proteins may be oligomerized or otherwise chemically or physically associated. It is possible that this association involves a conformational change in GBS 104 that facilitates its transition to the surface of the GBS bacteria. In addition, one or more AI sortases may also be involved in this surface localization and chemical or physical association. Similar relationships are thought to exist within GBS AI-2. The compositions of the invention may therefore include at least two AI proteins, wherein the two AI proteins are physically or chemically associated. Preferably, the two AI proteins form an oligomer. Preferably, one or more of the AI proteins are in a hyper-oligomeric form. In one embodiment, the associated AI proteins may be purified or isolated from a GBS bacteria or recombinant host cell.

[0024] It is also an object of the invention to provide further and improved compositions for providing prophylactic or therapeutic protection against disease and/or infection of Gram positive bacteria. The compositions are based on the identification of adhesin islands within Streptococcal genomes and the use of amino acid sequences encoded by these islands in therapeutic or prophylactic compositions. The invention further includes compositions comprising immunogenic adhesin island proteins within other Gram positive bacteria in therapeutic or prophylactic compositions. Preferred Gram positive adhesin island proteins for use in the invention may be derived from Staphylococcus (such as S. aureus), Streptococcus (such as S. agalactiae (GBS), S. pyogenes (GAS), S. pneumoniae, S. mutans), Enterococcus (such as E. faecalis and E. faecium), Clostridium (such as C. difficile), Listeria (such as L. monocytogenes) and Corynebacterium (such as C. diphtheria). Preferably, the Gram positive adhesin island surface proteins are in oligomeric or hyperologimeric form.

[0025] For example, Applicants have identified adhesin islands within the genomes of several Group A Streptococcus serotypes and isolates. These adhesion islands are thought to encode surface proteins which are important in the bacteria's virulence, and Applicants have obtained the first electron micrographs revealing the presence of these adhesin island proteins in hyperoligomeric pilus structures on the surface of Group A Streptococcus.

[0026] Group A Streptococcus is a human specific pathogen which causes a wide variety of diseases ranging from pharyngitis and impetigo through life threatening invasive disease and necrotizing fasciitis. In addition, post-streptococcal autoimmune responses are still a major cause of cardiac pathology in children.

[0027] Group A Streptococcal infection of its human host can generally occur in three phases. The first phase involves attachment and/or invasion of the bacteria into host tissue and multiplication of the bacteria within the extracellular spaces. Generally this attachment phase begins in the throat or the skin. The deeper the tissue level infected, the more severe the damage that can be caused. In the second stage of infection, the bacteria secretes a soluble toxin that diffuses into the surrounding tissue or even systemically through the vasculature. This toxin binds to susceptible host cell receptors and triggers inappropriate immune responses by these host cells, resulting in pathology. Because the toxin can diffuse throughout the host, the necrosis directly caused by the GAS toxins may be physically located in sites distant from the bacterial infection. The final phase of GAS infection can occur long after the original bacteria have been cleared from the host system. At this stage, the host's previous immune response to the GAS bacteria due to cross reactivity between epitopes of a GAS surface protein, M, and host tissues, such as the heart. A general review of GAS infection can be found in Principles of Bacterial Pathogenesis, Groisman ed., Chapter 15 (2001).

[0028] In order to prevent the pathogenic effects associated with the later stages of GAS infection, an effective vaccine against GAS will preferably facilitate host elimination of the bacteria during the initial attachment and invasion stage.

[0029] Isolates of Group A Streptococcus are historically classified according to the M surface protein described above. The M protein is surface exposed trypsin-sensitive protein generally comprising two polypeptide chains complexed in an alpha helical formation. The carboxyl terminus is anchored in the cytoplasmic membrane and is highly conserved among all group A streptococci. The amino terminus, which extend through the cell wall to the cell surface, is responsible for the antigenic variability observed among the 80 or more serotypes of M proteins.

[0030] A second layer of classification is based on a variable, trypsin-resistant surface antigen, commonly referred to as the T-antigen. Decades of epidemiology based on M and T serological typing have been central to studies on the biological diversity and disease causing potential of Group A Streptococci. While the M-protein component and its inherent variability have been extensively characterized, even after five decades of study, there is still very little known about the structure and variability of T-antigens. Antisera to define T types is commercially available from several sources, including Sevapharma (sevapharma.cz/en).

[0031] The gene coding for one form of T-antigen, T-type 6, from an M6 strain of GAS (D741) has been cloned and characterized and maps to an approximately 11 kb highly variable pathogenicity island. Schneewind et al., J Bacteriol. (1990) 172(6):3310-3317. This island is known as the Fibronectin-binding, Collagen-binding T-antigen (FCT) region because it contains, in addition to the T6 coding gene (tee6), members of a family of genes coding for Extra Cellular Matrix (ECM) binding proteins. Bessen et al., Infection & Immunity (2002) 70(3):1159-1167. Several of the protein products of this gene family have been shown to directly bind either fibronectin and/or collagen. See Hanski et al., Infection & Immunity (1992) 60(12):5119-5125; Talay et al., Infection & Immunity (1992(60(9):3837-3844; Jaffe et al. (1996) 21(2):373-384; Rocha et al., Adv Exp Med Biol. (1997) 418:737-739; Kreikemeyer et al., J Biol Chem (2004) 279(16):15850-15859; Podbielski et al., Mol. Microbiol. (1999) 31(4):1051-64; and Kreikemeyer et al., Int. J. Med Microbiol (2004) 294(2-3):177-88. In some cases direct evidence for a role of these proteins in adhesion and invasion has been obtained.

[0032] Applicants raised antiserum against a recombinant product of the tee6 gene and used it to explore the expression of T6 in M6 strain 2724. In immunoblot of mutanolysin extracts of this strain, the antiserum recognized, in addition to a band corresponding to the predicted molecular mass of the product, very high molecular weight ladders ranging in mobility from about 100 kDa to beyond the resolution of the 3-8% gradient gels used.

[0033] This pattern of high molecular weight products is similar to that observed in immunoblots of the protein components of the pili identified in Streptococcus agalactiae (described above) and previously in Corynebacterium diphtheriae. Electron microscopy of strain M6_{—}2724 with antisera specific for the product of tee6 revealed abundant surface staining and long pilus like structures extending up to 700 nanometers from the bacterial surface, revealing that the T6 protein, one of the antigens recognized in the original Lancefield serotyping system, is located within a GAS Adhesin Island (GAS AI-1) and forms long covalently linked pilus structures.

[0034] Applicants have identified at least six different Group A Streptococcus Adhesin Islands. While these GAS AI sequences can be identified in numerous M types, Applicants have surprisingly discovered a correlation between the four main pilus subunits from the four different GAS AI types and specific T classifications. While other trypsin-resistant surface exposed proteins are likely also implicated in the T classification designations, the discovery of the role of the GAS adhesin islands (and the associated hyper-oligomeric pilus like structures) in T classification and GAS serotype variance has important implications for prevention and treatment of GAS infections. Applicants have identified protein components within each of the GAS adhesin islands which are associated with the pilus formation. These proteins are believed to be involved in the bacteria's initial adherence mechanisms Immunological recognition of these proteins may allow the host immune response to slow or prevent the bacteria's transition into the more pathogenic later stages of infection.

[0035] In addition, Applicants have discovered that the GBS pili structures appear to be implicated in the formation of biofilms (populations of bacteria growing on a surface, often enclosed in an exopolysaccharide matrix). Biofilms are generally associated with bacterial resistance, as antibiotic treatments and host immune response are frequently unable to eradicate all of the bacteria components of the biofilm. Direction of a host immune response against surface proteins exposed during the first steps of bacterial attachment (i.e., before complete biofilm formation) is preferable.

[0036] The invention therefore provides for improved immunogenic compositions against GAS infection which may target GAS bacteria during their initial attachment efforts to the host epithelial cells and may provide protection against a wide range of GAS serotypes. The immunogenic compositions of the invention include GAS AI surface proteins which may be formulated in an oligomeric, or hyperoligomeric (pilus) form. The immunogenic compositions of the invention may include one or more GAS AI surface proteins. The invention also includes combinations of GAS AI surface proteins. Combinations of GAS AI surface proteins may be selected from the same adhesin island or they may be selected from different GAS adhesin islands.

[0037] Amino acid sequence encoded by such GAS Adhesin Islands may be used in immunogenic compositions for the treatment or prevention of GAS infection. Preferred immunogenic compositions of the invention comprise a GAS AI surface protein which has been formulated or purified in an oligomeric (pilus) form. In a preferred embodiment, the oligomeric form is a hyperoligomer.

[0038] GAS Adhesin Islands generally include a series of open reading frames within a GAS genome that encode for a collection of surface proteins and sortases. A GAS Adhesin Island may encode for an amino acid sequence comprising at least one surface protein. The Adhesin Island, therefore, may encode at least one surface protein. Alternatively, a GAS Adhesin Island may encode for at least two surface proteins and at least one sortase. Preferably, a GAS Adhesin Island encodes for at least three surface proteins and at least two sortases. One or more of the surface proteins may include an LPXTG motif (e.g., SEQ ID NO:122) or other sortase substrate motif. One or more GAS AI surface proteins may participate in the formation of a pilus structure on the surface of the Gram positive bacteria.

[0039] GAS Adhesin Islands of the invention preferably include a divergently transcribed transcriptional regulator. The transcriptional regulator may regulate the expression of the GAS AI operon. Examples of transcriptional regulators found in GAS AI sequences include RofA and Nra.

[0040] The GAS AI surface proteins may bind or otherwise adhere to fibrinogen, fibronectin, or collagen. One or more of the GAS AI surface proteins may comprise a fimbrial structural subunit.

[0041] One or more of the GAS AI surface proteins may include an LPXTG motif or other sortase substrate motif. The LPXTG motif may be followed by a hydrophobic region and a charged C terminus, which are thought to retard the protein in the cell membrane to facilitate recognition by the membrane-localized sortase. See Barnett, et al., J. Bacteriology (2004) 186 (17): 5865-5875.

[0042] GAS AI sequences may be generally categorized as Type 1, Type 2, Type 3, or Type 4, depending on the number and type of sortase sequences within the island and the percentage identity of other proteins (with the exception of RofA and cpa) within the island. Schematics of the GAS adhesin islands are set forth in FIG. 51A and FIG. 162. “GAS Adhesin Island-1 or “GAS AI-1” comprises a series of approximately five open reading frames encoding for a collection of amino acid sequences comprising surface proteins and sortases (“GAS AI-1 proteins”). GAS AI-1 preferably comprises surface proteins, a srtB sortase and a rofA divergently transcribed transcriptional regulator. GAS AI-1 surface proteins may include a fibronectin binding protein, a collagen adhesion protein and a fimbrial structural subunit. The fimbrial structural subunit (also known as tee6) is thought to form the shaft portion of the pilus like structure, while the collagen adhesion protein (Cpa) is thought to act as an accessory protein facilitating the formation of the pilus structure, exposed on the surface of the bacterial capsule.

[0043] Specifically, GAS AI-1 includes polynucleotide sequences encoding for two or more of M6_Spy0157, M6_Spy0158, M6_Spy0159, M6_Spy0160, M6_Spy0161. The GAS AI-1 may also include polynucleotide sequences encoding for any one of CDC SS 410_fimbrial, ISS3650_fimbrial, DSM2071_fimbrial.

[0044] A preferred immunogenic composition of the invention comprises a GAS AI-1 surface protein which may be formulated or purified in an oligomeric (pilus) form. In a preferred embodiment, the oligomeric form is a hyperoligomer. The immunogenic composition of the invention may alternatively comprise an isolated GAS AI-1 surface protein in oligomeric (pilus) form. The oligomer or hyperoligomeric pilus structures comprising GAS AI-1 surface proteins may be purified or otherwise formulated for use in immunogenic compositions.

[0045] One or more of the GAS AI-1 polynucleotide sequences may be replaced by a polynucleotide sequence coding for a fragment of the replaced ORF. Alternatively, one or more of the GAS AI-1 open reading frames may be replaced by a sequence having sequence homology (sequence identity) to the replaced ORF.

[0046] One or more of the GAS AI-1 surface proteins typically include an LPXTG motif (e.g., SEQ ID NO:122) or other sortase substrate motif. These sortase proteins are thought to be involved in the secretion and anchoring of the LPXTG containing surface proteins. GAS AI-1 may encode for at least one surface protein. Alternatively, GAS AI-1 may encode for at least two surface proteins and at least one sortase. Preferably, GAS AI-1 encodes for at least three surface proteins and at least two sortases. One or more of the surface proteins may include an LPXTG motif.

[0047] GAS AI-1 preferably includes a srtB sortase. GAS srtB sortases may preferably anchor surface proteins with an LPSTG motif (SEQ ID NO:166), particularly where the motif is followed by a serine.

[0048] The GAS AI-1 protein of the composition may be selected from the group consisting of M6_Spy0157, M6_Spy0158, M6_Spy0159, M6_Spy0160 M6_Spy0161, CDC SS 410_fimbrial, ISS3650_fimbrial, and DSM2071fimbrial. GAS AI-1 surface proteins M6_Spy0157 (a fibronectin binding protein), M6_Spy0159 (a collagen adhesion protein, Cpa), M6_Spy0160 (a fimbrial structural subunit, tee6), CDC SS 410_fimbrial (a fimbrial structural subunit), ISS3650_fimbrial (a fimbrial structural subunit), and DSM2071_fimbrial (a fimbrial structural subunit) are preferred GAS AI-1 proteins for use in the immunogenic compositions of the invention. The fimbrial structural subunit tee6 and the collagen adhesion protein Cpa are preferred GAS AI-1 surface proteins. Preferably, each of these GAS AI-1 surface proteins includes an LPXTG sortase substrate motif, such as LPXTG (SEQ ID NO:122) or LPXSG (SEQ ID NO:134) (conservative replacement of threonine with serine).

[0049] In addition to the open reading frames encoding the GAS AI-1 proteins, GAS AI-1 may also include a divergently transcribed transcriptional regulator such as rofA (i.e., the transcriptional regulator is located near or adjacent to the GAS AI protein open reading frames, but it transcribed in the opposite direction).

[0050] The GAS AI-1 surface proteins may be used alone, in combination with other GAS AI-1 surface proteins or in combination with other GAS AI surface proteins. Preferably, the immunogenic compositions of the invention include the GAS AI-1 fimbrial structural subunit (tee6) and the GAS AI-1 collagen binding protein. Still more preferably, the immunogenic compositions of the invention include the GAS AI-1 fimbrial structural subunit (tee6).

[0051] A second GAS adhesion island, “GAS Adhesin Island-2” or “GAS AI-2,” has also been identified in GAS serotypes. Amino acid sequences encoded by the open reading frames of GAS AI-2 may also be used in immunogenic compositions for the treatment or prevention of GAS infection.

[0052] A preferred immunogenic composition of the invention comprises a GAS AI-2 surface protein which may be formulated or purified in an oligomeric (pilus) form. In a preferred embodiment, the oligomeric form is a hyperoligomer. A preferred immunogenic composition of the invention alternatively comprises an isolated GAS AI-2 surface protein in oligomeric (pilus) form. The oligomer or hyperoligomeric pilus structures comprising GAS AI-2 surface proteins may be purified or otherwise formulated for use in immunogenic compositions.

[0053] GAS AI-2 comprises a series of approximately eight open reading frames encoding for a collection of amino acid sequences comprising surface proteins and sortases (“GAS AI-2 proteins”). GAS AI-2 preferably comprises surface proteins, a srtB sortase, a srtC1 sortase and a rofA divergently transcribed transcriptional regulator.

[0054] Specifically, GAS AI-2 includes polynucleotide sequences encoding for two or more of GAS15, Spy0127, GAS16, GAS17, GAS18, Spy0131, Spy0133, and GAS20.

[0055] One or more of the GAS AI-2 polynucleotide sequences may be replaced by a polynucleotide sequence coding for a fragment of the replaced ORF. Alternatively, one or more of the GAS AI-2 open reading frames may be replaced by a sequence having sequence homology (sequence identity) to the replaced ORF.

[0056] One or more of the GAS AI-2 surface proteins typically include an LPXTG motif (e.g., SEQ ID NO:122) or other sortase substrate motif. These sortase proteins are thought to be involved in the secretion and anchoring of the LPXTG containing surface proteins. GAS AI-2 may encode for at least one surface protein. Alternatively, GAS AI-2 may encode for at least two surface proteins and at least one sortase. Preferably, GAS AI-2 encodes for at least three surface proteins and at least two sortases. One or more of the surface proteins may include an LPXTG motif.

[0057] GAS AI-2 preferably includes a srtB sortase and a srtC1 sortase. As discussed above, GAS srtB sortases may preferably anchor surface proteins with an LPSTG motif (SEQ ID NO:166), particularly where the motif is followed by a serine. GAS srtC1 sortase may preferentially anchor surface proteins with a V(P/V)PTG (SEQ ID NO:167) motif. GAS srtC1 may be differentially regulated by rofA.

[0058] The GAS AI-2 protein of the composition may be selected from the group consisting of GAS15, Spy0127, GAS16, GAS17, GAS18, Spy0131, Spy0133, and GAS20. GAS AI-2 surface proteins GAS15 (Cpa), GAS16 (thought to be a fimbrial protein, M1_{—}128), GAS18 (M1_Spy0130), and GAS20 are preferred for use in the immunogenic compositions of the invention. GAS 16 is thought to form the shaft portion of the pilus like structure, while GAS 15 (the collagen adhesion protein Cpa) and GAS 18 are thought to act as accessory proteins facilitating the formation of the pilus structure, exposed on the surface of the bacterial capsule. Preferably, each of these GAS AI-2 surface proteins includes an LPXTG sortase substrate motif, such as LPXTG (SEQ ID NO:122), VVXTG (SEQ ID NO:135), or EVXTG (SEQ ID NO:136).

[0059] In addition to the open reading frames encoding the GAS AI-2 proteins, GAS AI-2 may also include a divergently transcribed transcriptional regulator such as rofA (i.e., the transcriptional regulator is located near or adjacent to the GAS AI protein open reading frames, but it transcribed in the opposite direction).The GAS AI-2 surface proteins may be used alone, in combination with other GAS AI-2 surface proteins or in combination with other GAS AI surface proteins. Preferably, the immunogenic compositions of the invention include the GAS AI-2 fimbrial protein (GAS 16), the GAS AI-2 collagen binding protein (GAS 15) and GAS 18 (M1_Spy0130). More preferably, the immunogenic compositions of the invention include the GAS AI-2 fimbrial protein (GAS 16).

[0060] A third GAS adhesion island, “GAS Adhesin Island-3” or “GAS AI-3,” has also been identified in numerous GAS serotypes. Amino acid sequences encoded by the open reading frames of GAS AI-3 may also be used in immunogenic compositions for the treatment or prevention of GAS infection.

[0061] A preferred immunogenic composition of the invention comprises a GAS AI-3 surface protein which may be formulated or purified in an oligomeric (pilus) form. In a preferred embodiment, the oligomeric form is a hyperoligomer. A preferred immunogenic composition of the invention alternatively comprises an isolated GAS AI-3 surface protein in oligomeric (pilus) form. The oligomer or hyperoligomeric pilus structures comprising GAS AI-3 surface proteins may be purified or otherwise formulated for use in immunogenic compositions. GAS AI-3 comprises a series of approximately seven open reading frames encoding for a collection of amino acid sequences comprising surface proteins and sortases (“GAS AI-3 proteins”). GAS AI-3 preferably comprises surface proteins, a srtC2 sortase, and a Negative transcriptional regulator (Nra) divergently transcribed transcriptional regulator. GAS AI-3 surface proteins may include a collagen binding protein, a fimbrial protein, and a F2 like fibronectin-binding protein. GAS AI-3 surface proteins may also include a hypothetical surface protein. The fimbrial protein is thought to form the shaft portion of the pilus like structure, while the collagen adhesion protein (Cpa) and the hypothetical surface protein are thought to act as accessory proteins facilitating the formation of the pilus structure, exposed on the surface of the bacterial capsule. Preferred AI-3 surface proteins include the fimbrial protein, the collagen binding protein and the hypothetical protein. Preferably, each of these GAS AI-3 surface proteins include an LPXTG sortase substrate motif, such as LPXTG (SEQ ID NO:122), VPXTG (SEQ ID NO:137), QVXTG (SEQ ID NO:138) or LPXAG (SEQ ID NO:139).

[0062] Specifically, GAS AI-3 includes polynucleotide sequences encoding for two or more of SpyM3_{—}0098, SpyM3_{—}0099, SpyM3_{—}0100, SpyM3_{—}0101, SpyM3_{—}0102, SpyM3_{—}0103, SpyM3_{—}0104, Sps0100, Sps0101, Sps0102, Sps0103, Sps0104, Sps0105, Sps0106, orf78, orf79, orf80, orf81, orf82, orf83, orf84, spyM18_{—}0126, spyM18_{—}0127, spyM18_{—}0128, spyM18_{—}0129, spyM18_{—}0130, spyM18_{—}0131, spyM18_{—}0132, SpyoM01000156, SpyoM01000155, SpyoM01000154, SpyoM01000153, SpyoM01000152, SpyoM01000151, SpyoM01000150, SpyoM01000149, ISS3040_fimbrial, ISS3776_fimbrial, and ISS4959_fimbrial. In one embodiment, GAS AI-3 may include open reading frames encoding for two or more of SpyM3_{—}0098, SpyM3_{—}0099, SpyM3_{—}0100, SpyM3_{—}0101, SpyM3_{—}0102, SpyM3_{—}0103, and SpyM3_{—}0104. Alternatively, GAS AI-3 may include open reading frames encoding for two or more of Sps0100, Sps0101, Sps0102, Sps0103, Sps0104, Sps0105, and Sps0106. Alternatively, GAS AI-3 may include open reading frames encoding for two or more of orf78, orf79, orf80, orf81, orf82, orf83, and orf84. Alternatively, GAS AI-3 may include open reading frames encoding for two or more of spyM18_{—}0126, spyM18_{—}0127, spyM18_{—}0128, spyM18_{—}0129, spyM18_{—}0130, spyM18_{—}0131, and spyM18_{—}0132. Alternatively, GAS AI-3 may include open reading frames encoding for two or more of SpyoM01000156, SpyoM01000155, SpyoM01000154, SpyoM01000153, SpyoM01000152, SpyoM01000151, SpyoM01000150, and SpyoM01000149. Alternatively, GAS AI-1 may also include polynucleotide sequences encoding for any one of ISS3040_fimbrial, ISS3776_fimbrial, and ISS4959_fimbrial.

[0063] One or more of the GAS AI-3 polynucleotide sequences may be replaced by a polynucleotide sequence coding for a fragment of the replaced ORF. Alternatively, one or more of the GAS AI-3 open reading frames may be replaced by a sequence having sequence homology (sequence identity) to the replaced ORF.

[0064] One or more of the GAS AI-3 surface proteins typically include an LPXTG motif (e.g., SEQ ID NO:122) or other sortase substrate motif. These sortase proteins are thought to be involved in the secretion and anchoring of the LPXTG containing surface proteins. GAS AI-3 may encode for at least one surface protein. Alternatively, GAS AI-3 may encode for at least two surface proteins and at least one sortase. Preferably, GAS AI-3 encodes for at least three surface proteins and at least two sortases. One or more of the surface proteins may include an LPXTG motif.

[0065] GAS AI-3 preferably includes a srtC2 type sortase. GAS srtC2 type sortases may preferably anchor surface proteins with a QVPTG (SEQ ID NO:140) motif, particularly when the motif is followed by a hydrophobic region and a charged C terminus tail. GAS SrtC2 may be differentially regulated by Nra.

[0066] The GAS AI-3 protein of the composition may be selected from the group consisting of SpyM3_{—}0098, SpyM3_{—}0099, SpyM3_{—}0100, SpyM3_{—}0101, SpyM3_{—}0102, SpyM3_{—}0103, SpyM3_{—}0104, Sps0100, Sps0101, Sps0102, Sps0103, Sps0104, Sps0105, Sps0106, orf78, orf79, orf80, orf81, orf82, orf83, orf84, spyM18_{—}0126, spyM18_{—}0127, spyM18_{—}0128, spyM18_{—}0129, spyM18_{—}0130, spyM18_{—}0131, spyM18_{—}0132, SpyoM01000156, SpyoM01000155, SpyoM01000154, SpyoM01000153, SpyoM01000152, SpyoM01000151, SpyoM01000150, SpyoM01000149, ISS3040_fimbrial, ISS3776_fimbrial, and ISS4959_fimbrial. GAS AI-3 surface proteins SpyM3_{—}0098, SpyM3_{—}0100, SpyM3_{—}0102, SpyM3_{—}0104, SPs0100, SPs0102, SPs0104, SPs0106, orf78, orf80, orf82, orf84, spyM18_{—}0126, spyM18_{—}0128, spyM18_{—}0130, spyM18_{—}0132, SpyoM01000155, SpyoM01000153, SpyoM01000151, SpyoM01000149, ISS3040_fimbrial, ISS3776_fimbrial, and ISS4959_fimbrial are preferred GAS AI-3 proteins for use in the immunogenic compositions of the invention.

[0067] In addition to the open reading frames encoding the GAS AI-3 proteins, GAS AI-3 may also include a transcriptional regulator such as Nra.

[0068] GAS AI-3 may also include a LepA putative signal peptidase I protein.

[0069] The GAS AI-3 surface proteins may be used alone, in combination with other GAS AI-3 surface proteins or in combination with other GAS AI surface proteins. Preferably, the immunogenic compositions of the invention include the GAS AI-3 fimbrial protein, the GAS AI-3 collagen binding protein, the GAS AI-3 surface protein (such as SpyM3_{—}0102, M3_Sps0104, M5_orf82, or spyM18_{—}0130), and fibronectin binding protein PrtF2. More preferably, the immunogenic compositions of the invention include the GAS AI-3 fimbrial protein, the GAS AI-3 collagen binding protein, and the GAS AI-3 surface protein. Still more preferably, the immunogenic compositions of the invention include the GAS AI-3 fimbrial protein.

[0070] Representative examples of the GAS AI-3 fimbrial protein include SpyM3_{—}0100, M3_Sps0102, M5_orf80, spyM18_{—}128, SpyoM01000153, ISS3040_fimbrial, ISS3776_fimbrial, ISS4959_fimbrial.

[0071] Representative examples of the GAS AI-3 collagen binding protein include SpyM30098, M3_Sps0100, M5_orf 78, spyM18_{—}0126, and SpyoM01000155.

[0072] Representative examples of the GAS AI-3 fibronectin binding protein PrtF2 include SpyM30104, M3_Sps0106, M5_orf84 and spyM180132, and SpyoM01000149.

[0073] A fourth GAS adhesion island, “GAS Adhesin Island-4” or “GAS AI-4,” has also been identified in GAS serotypes. Amino acid sequences encoded by the open reading frames of GAS AI-4 may also be used in immunogenic compositions for the treatment or prevention of GAS infection.

[0074] A preferred immunogenic composition of the invention comprises a GAS AI-4 surface protein which may be formulated or purified in an oligomeric (pilus) form. In a preferred embodiment, the oligomeric form is a hyperoligomer. A preferred immunogenic composition of the invention alternatively comprises an isolated GAS AI-4 surface protein in oligomeric (pilus) form. The oligomer or hyperoligomeric pilus structures comprising GAS AI-3 surface proteins may be purified or otherwise formulated for use in immunogenic compositions. The oligomeric or hyperoligomeric pilus structures comprising GAS AI-4 surface proteins may be purified or otherwise formulated for use in immunogenic compositions.

[0075] GAS AI-4 comprises a series of approximately eight open reading frames encoding for a collection of amino acid sequences comprising surface proteins and sortases (“GAS AI-4 proteins”). This GAS adhesin island 4 (“GAS AI-4”) comprises surface proteins, a srtC2 sortase, and a RofA regulatory protein. GAS AI-4 surface proteins within may include a fimbrial protein, F1 and F2 like fibronectin-binding proteins, and a capsular polysaccharide adhesion protein (cpa). GAS AI-4 surface proteins may also include a hypothetical surface protein in an open reading frame (orf).

[0076] The fimbrial protein (EftLSL) is thought to form the shaft portion of the pilus like structure, while the collagen adhesion protein (Cpa) and the hypothetical protein are thought to act as accessory proteins facilitating the formation of the pilus structure, exposed on the surface of the bacterial capsule. Preferably, each of these GAS AI-4 surface proteins include an LPXTG sortase substrate motif, such as LPXTG (SEQ ID NO:122), VPXTG (SEQ ID NO:137), QVXTG (SEQ ID NO:138) or LPXAG (SEQ ID NO:139).

[0077] Specifically, GAS AI-4 includes polynucleotide sequences encoding for two or more of 19224134, 19224135, 19224136, 19224137, 19224138, 19224139, 19224140, and 19224141. A GAS AI-4 polynucleotide may also include polynucleotide sequences encoding for any one of 20010296_fimbrial, 20020069 fimbrial, CDC SS 635 fimbrial, ISS4883fimbrial, ISS4538fimbrial. One or more of the GAS AI-4 polynucleotide sequences may be replaced by a polynucleotide sequence coding for a fragment of the replaced ORF. Alternatively, one or more of the GAS AI-4 open reading frames may be replaced by a sequence having sequence homology (sequence identity) to the replaced ORF.

[0078] One or more of the GAS AI-4 surface proteins typically include an LPXTG motif (e.g., SEQ ID NO:122) or other sortase substrate motif. These sortase proteins are thought to be involved in the secretion and anchoring of the LPXTG containing surface proteins. GAS AI-4 may encode for at least one surface protein. Alternatively, GAS AI-4 may encode for at least two surface proteins and at least one sortase. Preferably, GAS AI-4 encodes for at least three surface proteins and at least two sortases. One or more of the surface proteins may include an LPXTG motif.

[0079] GAS AI-4 includes a SrtC2 type sortase. GAS SrtC2 type sortases may preferably anchor surface proteins with a QVPTG (SEQ ID NO:140) motif, particularly when the motif is followed by a hydrophobic region and a charged C terminus tail.

[0080] The GAS AI-4 protein of the composition may be selected from the group consisting of 19224134, 19224135, 19224136, 19224137, 19224138, 19224139, 19224140, 19224141, 20010296_fimbrial, 20020069_fimbrial, CDC SS 635_fimbrial, ISS4883_fimbrial, and ISS4538_fimbrial. GAS AI-4 surface proteins 19224134, 19224135, 19224137, 19224139, 19224141, 20010296_fimbrial, 20020069_fimbrial, CDC SS 635_fimbrial, ISS4883_fimbrial, ISS4538_fimbrial are preferred proteins for use in the immunogenic compositions of the invention.

[0081] In addition to the open reading frames encoding the GAS AI-4 proteins, GAS AI-4 may also include a divergently transcribed transcriptional regulator such as RofA (i.e., the transcriptional regulator is located near or adjacent to the AI protein open reading frames, but it transcribed in the opposite direction.

[0082] GAS AI-4 may also include a LepA putative signal peptidase I protein and a MsmRL protein. The GAS AI-4 surface proteins may be used alone, in combination with other GAS AI-4 surface proteins or in combination with other GAS AI surface proteins. Preferably, the immunogenic compositions of the invention include the GAS AI-4 fimbrial protein (EftLSL or 20010296_fimbrial, 20020069_fimbrial, CDC SS 635_fimbrial, ISS4883_fimbrial, or ISS4538_fimbrial), the GAS AI-4 collagen binding protein, the GAS AI-4 surface protein (such as M12 isolate A735 orf 2), and fibronectin binding protein PrtF1 and PrtF2. More preferably, the immunogenic compositions of the invention include the GAS AI-4 fimbrial protein, the GAS AI-4 collagen binding protein, and the GAS AI-4 surface protein. Still more preferably, the immunogenic compositions of the invention include the GAS AI-4 fimbrial protein.

[0083] A fifth GAS adhesion island, “GAS Adhesin Island-5” or “GAS AI-5,” has also been identified in GAS serotypes. Amino acid sequences encoded by the open reading frames of GAS AI-5 may also be used in immunogenic compositions for the treatment or prevention of GAS infection.

[0084] A preferred immunogenic composition of the invention comprises a GAS AI-5 surface protein which may be formulated or purified in an oligomeric (pilus) form. In a preferred embodiment, the oligomeric form is a hyperoligomer. A preferred immunogenic composition of the invention alternatively comprises an isolated GAS AI-5 surface protein in oligomeric (pilus) form. The oligomer or hyperoligomeric pilus structures comprising GAS AI-5 surface proteins may be purified or otherwise formulated for use in immunogenic compositions.

[0085] GAS AI-5 comprises a series of approximately eight open reading frames encoding for a collection of amino acid sequences comprising surface proteins and sortases (“GAS AI-5 proteins”). GAS AI-5 preferably comprises surface proteins, a srtB sortase, a srtC1 sortase and a rofA divergently transcribed transcriptional regulator.

[0086] Specifically, GAS AI-5 includes polynucleotide sequences encoding for two or more of MGAS10270_Spy0108, MGAS10270_Spy0109, MGAS10270_Spy0110, MGAS10270_Spy0111, MGAS10270_Spy0112, MGAS10270_Spy0113, MGAS10270_Spy0114, MGAS10270_Spy0115, MGAS10270_Spy0116, and MGAS10270_Spy0117. One or more of the GAS AI-5 polynucleotide sequences may be replaced by a polynucleotide sequence coding for a fragment of the replaced ORF. Alternatively, one or more of the GAS AI-5 open reading frames may be replaced by a sequence having sequence homology (sequence identity) to the replaced ORF.

[0087] One or more of the GAS AI-5 surface proteins typically include an LPXTG motif (e.g., SEQ ID NO:122) or other sortase substrate motif. These sortase proteins are thought to be involved in the secretion and anchoring of the LPXTG containing surface proteins. GAS AI-5 may encode for at least one surface protein. Alternatively, GAS AI-5 may encode for at least two surface proteins and at least one sortase. Preferably, GAS AI-5 encodes for at least three surface proteins and at least two sortases. One or more of the surface proteins may include an LPXTG motif.

[0088] GAS AI-5 preferably includes a srtB sortase and a srtC1 sortase. As discussed above, GAS srtB sortases may preferably anchor surface proteins with an LPSTG motif (SEQ ID NO:166), particularly where the motif is followed by a serine. GAS srtC1 sortase may preferentially anchor surface proteins with a V(P/V)PTG (SEQ ID NO:167) motif. GAS srtC1 may be differentially regulated by rofA.

[0089] The GAS AI-5 protein of the composition may be selected from the group consisting of MGAS10270_Spy0108, MGAS10270_Spy0109, MGAS10270_Spy0110, MGAS10270_Spy0111, MGAS10270_Spy0112, MGAS10270_Spy0113, MGAS10270_Spy0114, MGAS10270_Spy0115, MGAS10270_Spy0116, and MGAS10270_Spy0117. GAS AI-5 surface proteins are preferred for use in the immunogenic compositions of the invention. Preferably, each of these GAS AI-5 surface proteins includes a sortase substrate motif.

[0090] In addition to the open reading frames encoding the GAS AI-5 proteins, GAS AI-5 may also include a divergently transcribed transcriptional regulator such as rofA (i.e., the transcriptional regulator is located near or adjacent to the GAS AI protein open reading frames, but it transcribed in the opposite direction).The GAS AI-5 surface proteins may be used alone, in combination with other GAS AI-5 surface proteins or in combination with other GAS AI surface proteins.

[0091] A sixth GAS adhesion island, “GAS Adhesin Island-6” or “GAS AI-6,” has also been identified in GAS serotypes. Amino acid sequences encoded by the open reading frames of GAS AI-6 may also be used in immunogenic compositions for the treatment or prevention of GAS infection.

[0092] A preferred immunogenic composition of the invention comprises a GAS AI-6 surface protein which may be formulated or purified in an oligomeric (pilus) form. In a preferred embodiment, the oligomeric form is a hyperoligomer. A preferred immunogenic composition of the invention alternatively comprises an isolated GAS AI-6 surface protein in oligomeric (pilus) form. The oligomer or hyperoligomeric pilus structures comprising GAS AI-6 surface proteins may be purified or otherwise formulated for use in immunogenic compositions.

[0093] GAS AI-6 comprises a series of approximately eight open reading frames encoding for a collection of amino acid sequences comprising surface proteins and sortases (“GAS AI-6 proteins”). GAS AI-6 preferably comprises surface proteins, a srtB sortase, a srtC1 sortase and a rofA divergently transcribed transcriptional regulator.

[0094] Specifically, GAS AI-6 includes polynucleotide sequences encoding for two or more of MGAS10750_Spy0113, MGAS10750_Spy0114, MGAS10750_Spy0115, MGAS10750_Spy0116, MGAS10750_Spy0117, MGAS10750_Spy0118, MGAS10750_Spy0119, and MGAS10750_Spy0120.

[0095] One or more of the GAS AI-6 polynucleotide sequences may be replaced by a polynucleotide sequence coding for a fragment of the replaced ORF. Alternatively, one or more of the GAS AI-6 open reading frames may be replaced by a sequence having sequence homology (sequence identity) to the replaced ORF.

[0096] One or more of the GAS AI-6 surface proteins typically include an LPXTG motif (e.g., SEQ ID NO:122) or other sortase substrate motif. These sortase proteins are thought to be involved in the secretion and anchoring of the LPXTG containing surface proteins. GAS AI-6 may encode for at least one surface protein. Alternatively, GAS AI-6 may encode for at least two surface proteins and at least one sortase. Preferably, GAS AI-6 encodes for at least three surface proteins and at least two sortases. One or more of the surface proteins may include an LPXTG motif.

[0097] GAS AI-6 preferably includes a srtB sortase and a srtC1 sortase. As discussed above, GAS srtB sortases may preferably anchor surface proteins with an LPSTG motif (SEQ ID NO:166), particularly where the motif is followed by a serine. GAS srtC1 sortase may preferentially anchor surface proteins with a V(P/V)PTG (SEQ ID NO:167) motif. GAS srtC1 may be differentially regulated by rofA.

[0098] The GAS AI-6 protein of the composition may be selected from the group consisting of Specifically, GAS AI-6 includes polynucleotide sequences encoding for two or more of MGAS10750_Spy0113, MGAS10750_Spy0114, MGAS10750_Spy0115, MGAS10750_Spy0116, MGAS10750_Spy0117, MGAS10750_Spy0118, MGAS10750_Spy0119, and MGAS10750_Spy0120. GAS AI-6 surface proteins are preferred for use in the immunogenic compositions of the invention. Preferably, each of these GAS AI-6 surface proteins includes a sortase substrate motif.

[0099] In addition to the open reading frames encoding the GAS AI-6 proteins, GAS AI-6 may also include a divergently transcribed transcriptional regulator such as rofA (i.e., the transcriptional regulator is located near or adjacent to the GAS AI protein open reading frames, but it transcribed in the opposite direction).The GAS AI-6 surface proteins may be used alone, in combination with other GAS AI-6 surface proteins or in combination with other GAS AI surface proteins.

[0100] The GAS AI proteins of the invention may be used in immunogenic compositions for prophylactic or therapeutic immunization against GAS infection. For example, the invention may include an immunogenic composition comprising one or more GAS AI-1 proteins and one or more of any of GAS AI-2, GAS AI-3, or GAS AI-4 proteins. For example, the invention includes an immunogenic composition comprising at least two GAS AI proteins where each protein is selected from a different GAS adhesin island. The two GAS AI proteins may be selected from one of the following GAS AI combinations: GAS AI-1 and GAS AI-2; GAS AI-1 and GAS AI-3; GAS AI-1 and GAS AI-4; GAS AI-2 and GAS AI-3; GAS AI-2 and GAS AI-4; and GAS AI 3 and GAS AI-4. Preferably the combination includes fimbrial proteins from one or more GAS adhesin islands.

[0101] The immunogenic compositions may also be selected to provide protection against an increased range of GAS serotypes and strain isolates. For example, the immunogenic composition may comprise a first and second GAS AI protein, wherein a full length polynucleotide sequence encoding for the first GAS AI protein is not present in a genome comprising a full length polynucleotide sequence encoding for the second GAS AI protein. In addition, each antigen selected for use in the immunogenic compositions will preferably be present in the genomes of multiple GAS serotypes and strain isolates. Preferably, each antigen is present in the genomes of at least two (i.e., 3, 4, 5, 6, 7, 8, 9, 10, or more) GAS strain isolates. More preferably, each antigen is present in the genomes of at least two (i.e., at least 3, 4, 5, or more) GAS serotypes.

[0102] Applicants have also identified adhesin islands within the genome of Streptococcus pneumoniae. These adhesion islands are thought to encode surface proteins which are important in the bacteria's virulence. Amino acid sequence encoded by such S. pneumoniae Adhesin Islands may be used in immunogenic compositions for the treatment or prevention of S. pneumoniae infection. Preferred immunogenic compositions of the invention comprise a S. pneumoniae AI surface protein which has been formulated or purified in an oligomeric (pilus) form. In a preferred embodiment, the oligomeric form is a hyperoligomer. A preferred immunogenic composition of the invention alternatively comprises an isolated S. pneumoniae surface protein in oligomeric (pilus) form. The oligomer or hyperoligomeric pilus structures comprising S. pneumoniae surface proteins may be purified or otherwise formulated for use in immunogenic compositions.

[0103] The S. pneumoniae Adhesin Islands generally include a series of open reading frames within a S. pneumoniae genome that encode for a collection of surface proteins and sortases. A S. pneumoniae Adhesin Island may encode for an amino acid sequence comprising at least one surface protein. Alternatively, the S. pneumoniae Adhesin Island may encode for at least two surface proteins and at least one sortase. Preferably, a S. pneumoniae Adhesin Island encodes for at least three surface proteins and at least two sortases. One or more of the surface proteins may include an LPTXG motif (e.g., SEQ ID NO:122) or other sortase substrate motif. One or more S. pneumoniae AI surface proteins may participate in the formation of a pilus structure on the surface of the S. pneumoniae bacteria.

[0104] The S. pneumoniae Adhesin Islands of the invention preferably include a divergently transcribed transcriptional regulator. The transcriptional regulator may regulate the expression of the S. pneumoniae AI operon. An example of a transcriptional regulator found in S. pneumoniae AI sequences is rlrA.

[0105] A schematic of the organization of a S. pneumoniae AI locus is provided in FIG. 137. The locus comprises open reading frames encoding a transcriptional regulator (rlrA), cell wall surface proteins (rrgA, rrgB, rrgC) and sortases (srt B, srtC, srtD).

[0106] S. pneumoniae AI sequences may be generally divided into two groups of homology, S. pneumoniae AI-a and AI-b. S. pneumoniae strains that comprise AI-a include 14 CSR 10, 19A Hungary 6, 23 F Poland 16, 670, 6B Finland 12, and 6B Spain 2. S. pneumoniae AI strains that comprise AI-b include 19F Taiwan 14, 9V Spain 3, 23F Taiwan 15 and TIGR 4.

[0107] S. pneumoniae AI from TIGR4 comprises a series of approximately seven open reading frames encoding for a collection of amino acid sequences comprising surface proteins and sortases (“S. pneumoniae AI proteins”). Specifically, S. pneumoniae AI from TIGR4 includes polynucleotide sequences encoding for two or more of SPO462, SPO463, SPO464, SPO465, SPO466, SPO467, and SPO468.

[0108] One or more of the S. pneumoniae AI from TIGR4 polynucleotide sequences may be replaced by a polynucleotide sequence coding for a fragment of the replaced ORF. Alternatively, one or more of the S. pneumoniae AI from TIGR4 open reading frames may be replaced by a sequence having sequence homology to the replaced ORF.

[0109] S. pneumoniae strain 670 AI comprises a series of approximately seven open reading frames encoding for a collection of amino acid sequences comprising surface proteins and sortases (“S. pneumoniae AI proteins”). Specifically, S. pneumoniae strain 670 AI includes polynucleotide sequences encoding for two or more of orf1_{—}670, orf3_{—}670, orf4_{—}670, orf5_{—}670, orf6_{—}670, orf7_{—}670, and orf8_{—}670.

[0110] One or more of the S. pneumoniae strain 670 AI polynucleotide sequences may be replaced by a polynucleotide sequence coding for a fragment of the replaced ORF. Alternatively, one or more of the S. pneumoniae strain 670 AI open reading frames may be replaced by a sequence having sequence homology to the replaced ORF.

[0111] S. pneumoniae AI from 14 CSR10 comprises a series of approximately seven open reading frames encoding for a collection of amino acid sequences comprising surface proteins and sortases (“S. pneumoniae AI proteins”). Specifically, S. pneumoniae AI from 14 CSR10 includes polynucleotide sequences encoding for two or more of ORF2_{—}14CSR, ORF3_{—}14CSR, ORF4_{—}14CSR, ORF5_{—}14CSR, ORF6_{—}14CSR, ORF7_{—}14CSR, and ORF8_{—}14CSR.

[0112] One or more of the S. pneumoniae AI from 14 CSR10 polynucleotide sequences may be replaced by a polynucleotide sequence coding for a fragment of the replaced ORF. Alternatively, one or more of the S. pneumoniae AI from 14 CSR10 open reading frames may be replaced by a sequence having sequence homology to the replaced ORF.

[0113] S. pneumoniae AI from 19A Hungary 6 comprises a series of approximately seven open reading frames encoding for a collection of amino acid sequences comprising surface proteins and sortases (“S. pneumoniae AI proteins”). Specifically, S. pneumoniae AI from 19A Hungary 6 includes polynucleotide sequences encoding for two or more of ORF2_{—}19AH, ORF3_{—}19AH, ORF4_{—}19AH, ORF5_{—}19AH, ORF6_{—}19AH, ORF7_{—}19AH, and ORF8_{—}19AH.

[0114] One or more of the S. pneumoniae AI from 19A Hungary 6 polynucleotide sequences may be replaced by a polynucleotide sequence coding for a fragment of the replaced ORF. Alternatively, one or more of the S. pneumoniae AI from 19A Hungary 6 open reading frames may be replaced by a sequence having sequence homology to the replaced ORF.

[0115] S. pneumoniae AI from 19F Taiwan 14 comprises a series of approximately seven open reading frames encoding for a collection of amino acid sequences comprising surface proteins and sortases (“S. pneumoniae AI proteins”). Specifically, S. pneumoniae AI from 19F Taiwan 14 includes polynucleotide sequences encoding for two or more of ORF2_{—}19FTW, ORF3_{—}19FTW, ORF4_{—}19FTW, ORF5_{—}19FTW, ORF6_{—}19FTW, ORF7_{—}19FTW, and ORF8_{—}19FTW.

[0116] One or more of the S. pneumoniae AI from 19F Taiwan 14 polynucleotide sequences may be replaced by a polynucleotide sequence coding for a fragment of the replaced ORF. Alternatively, one or more of the S. pneumoniae AI from 19F Taiwan 14 open reading frames may be replaced by a sequence having sequence homology to the replaced ORF.

[0117] S. pneumoniae AI from 23F Poland 16 comprises a series of approximately seven open reading frames encoding for a collection of amino acid sequences comprising surface proteins and sortases (“S. pneumoniae AI proteins”). Specifically, S. pneumoniae AI from 23F Poland 16 includes polynucleotide sequences encoding for two or more of ORF2_{—}23FP, ORF3_{—}23FP, ORF4_{—}23FP, ORF5_{—}23FP, ORF6_{—}23FP, ORF7_{—}23FP, and ORF8_{—}23FP.

[0118] One or more of the S. pneumoniae AI from 23F Poland 16 polynucleotide sequences may be replaced by a polynucleotide sequence coding for a fragment of the replaced ORF. Alternatively, one or more of the S. pneumoniae AI from 23F Poland 16 open reading frames may be replaced by a sequence having sequence homology to the replaced ORF.

[0119] S. pneumoniae AI from 23F Taiwan 15 comprises a series of approximately seven open reading frames encoding for a collection of amino acid sequences comprising surface proteins and sortases (“S. pneumoniae AI proteins”). Specifically, S. pneumoniae AI from 23F Taiwan 15 includes polynucleotide sequences encoding for two or more of ORF2_{—}23FTW, ORF3_{—}23FTW, ORF4_{—}23FTW, ORF5_{—}23FTW, ORF6_{—}23FTW, ORF7_{—}23FTW, and ORF8_{—}23FTW.

[0120] One or more of the S. pneumoniae AI from 23F Taiwan 15 polynucleotide sequences may be replaced by a polynucleotide sequence coding for a fragment of the replaced ORF. Alternatively, one or more of the S. pneumoniae AI from 23F Taiwan 15 open reading frames may be replaced by a sequence having sequence homology to the replaced ORF.

[0121] S. pneumoniae AI from 6B Finland 12 comprises a series of approximately seven open reading frames encoding for a collection of amino acid sequences comprising surface proteins and sortases (“S. pneumoniae AI proteins”). Specifically, S. pneumoniae AI from 6B Finland 12 includes polynucleotide sequences encoding for two or more of ORF2_{—}6BF, ORF3_{—}6BF, ORF4_{—}6BF, ORF5_{—}6BF, ORF6_{—}6BF, ORF7_{—}6BF, and ORF8_{—}6BF.

[0122] One or more of the S. pneumoniae AI from 6B Finland 12 polynucleotide sequences may be replaced by a polynucleotide sequence coding for a fragment of the replaced ORF. Alternatively, one or more of the S. pneumoniae AI from 6B Finland 12 open reading frames may be replaced by a sequence having sequence homology to the replaced ORF.

[0123] S. pneumoniae AI from 6B Spain 2 comprises a series of approximately seven open reading frames encoding for a collection of amino acid sequences comprising surface proteins and sortases (“S. pneumoniae AI proteins”). Specifically, S. pneumoniae AI from 6B Spain 2 includes polynucleotide sequences encoding for two or more of ORF2_{—}6BSP, ORF3_{—}6BSP, ORF4_{—}6BSP, ORF5_{—}6BSP, ORF6_{—}6BSP, ORF7_{—}6BSP, and ORF8_{—}6BSP.

[0124] One or more of the S. pneumoniae AI from 6B Spain 2 polynucleotide sequences may be replaced by a polynucleotide sequence coding for a fragment of the replaced ORF. Alternatively, one or more of the S. pneumoniae AI from 6B Spain 2 open reading frames may be replaced by a sequence having sequence homology to the replaced ORF.

[0125] S. pneumoniae AI from 9V Spain 3 comprises a series of approximately seven open reading frames encoding for a collection of amino acid sequences comprising surface proteins and sortases (“S. pneumoniae AI proteins”). Specifically, S. pneumoniae AI from 9V Spain 3 includes polynucleotide sequences encoding for two or more of ORF2_{—}9VSP, ORF3_{—}9VSP, ORF4_{—}9VSP, ORF5_{—}9VSP, ORF6_{—}9VSP, ORF7_{—}9VSP, and ORF8_{—}9VSP.

[0126] One or more of the S. pneumoniae AI from 9V Spain 3 polynucleotide sequences may be replaced by a polynucleotide sequence coding for a fragment of the replaced ORF. Alternatively, one or more of the S. pneumoniae AI from 9V Spain 3 open reading frames may be replaced by a sequence having sequence homology to the replaced ORF.

[0127] One or more of the S. pneumoniae AI surface proteins typically include an LPXTG motif (e.g., SEQ ID NO:122) or other sortase substrate motif. These sortase proteins are thought to be involved in the secretion and anchoring of the LPXTG containing surface proteins. S. pneumoniae AI may encode for at least one surface protein. The Adhesin Island, may encode at least one surface protein. Alternatively, S. pneumoniae AI may encode for at least two surface proteins and at least one sortase. Preferably, S. pneumoniae AI encodes for at least three surface proteins and at least two sortases. One or more of the surface proteins may include an LPXTG motif.

[0128] The S. pneumoniae AI protein of the composition may be selected from the group consisting of SPO462, SPO463, SPO464, SPO465, SPO466, SPO467, SPO468, orf1_{—}670, orf3_{—}670, orf4_{—}670, orf5_{—}670, orf6_{—}670, orf7_{—}670, orf8_{—}670, ORF2_{—}14CSR, ORF3_{—}14CSR, ORF4_{—}14CSR, ORF5_{—}14CSR, ORF6_{—}14CSR, ORF7_{—}14CSR, ORF8_{—}14CSR, ORF2_{—}19AH, ORF3_{—}19AH, ORF4_{—}19AH, ORF5_{—}19AH, ORF6_{—}19AH, ORF7_{—}19AH, ORF8_{—}19AH, ORF2_{—}19FTW, ORF3_{—}19FTW, ORF4_{—}19FTW, ORF5_{—}19FTW, ORF6_{—}19FTW, ORF7_{—}19FTW, ORF8_{—}19FTW, ORF2_{—}23FP, ORF3_{—}23FP, ORF4_{—}23FP, ORF5_{—}23FP, ORF6_{—}23FP, ORF7_{—}23FP, ORF8_{—}23FP, ORF2_{—}23FTW, ORF3_{—}23FTW, ORF4_{—}23FTW, ORF5_{—}23FTW, ORF6_{—}23FTW, ORF7_{—}23FTW, ORF8_{—}23FTW, ORF2_{—}6BF, ORF3_{—}6BF, ORF4_{—}6BF, ORF5_{—}6BF, ORF6_{—}6BF, ORF7_{—}6BF, ORF8_{—}6BF, ORF2_{—}6BSP, ORF3_{—}6BSP, ORF4_{—}6BSP, ORF5_{—}6BSP, ORF6_{—}6BSP, ORF7_{—}6BSP, ORF8_{—}6BSP, ORF2_{—}9VSP, ORF3_{—}9VSP, ORF4_{—}9VSP, ORF5_{—}9VSP, ORF6_{—}9VSP, ORF7_{—}9VSP and, ORF8_{—}9VSP.

[0129] S. pneumoniae AI surface proteins are preferred proteins for use in the immunogenic compositions of the invention. In one embodiment, the compositions of the invention comprise combinations of two or more S pneumoniae AI surface proteins. Preferably such combinations are selected from two or more of the group consisting of SPO462, SPO463, SPO464, orf3_{—}670, orf4_{—}670, orf5_{—}670, ORF3_{—}14CSR, ORF4_{—}14CSR, ORF5_{—}14CSR, ORF3_{—}19AH, ORF4_{—}19AH, ORF5_{—}19AH, ORF3_{—}19FTW, ORF4_{—}19FTW, ORF5_{—}19FTW, ORF3_{—}23FP, ORF4_{—}23FP, ORF5_{—}23FP, ORF3_{—}23FTW, ORF4_{—}23FTW, ORF5_{—}23FTW, ORF3_{—}6BF, ORF4_{—}6BF, ORF5_{—}6BF, ORF3_{—}6BSP, ORF4_{—}6BSP, ORF5_{—}6BSP, ORF3_{—}9VSP, ORF4_{—}9VSP, and ORF5_{—}9VSP.

[0130] In addition to the open reading frames encoding the S. pneumoniae AI proteins, S. pneumoniae AI may also include a transcriptional regulator.

[0131] The S. pneumoniae AI proteins of the invention may be used in immunogenic compositions for prophylactic or therapeutic immunization against S. pneumoniae infection. For example, the invention may include an immunogenic composition comprising one or more S. pneumoniae from TIGR4 AI proteins and one or more S. pneumoniae strain 670 proteins. The immunogenic composition may comprise one or more AI proteins from any one or more of S. pneumoniae strains TIGR4, 19A Hungary 6, 6B Finland 12, 6B Spain 2, 9V Spain 3, 14 CSR 10, 19F Taiwan 14, 23F Taiwan 15, 23F Poland 16, and 670.

[0132] The immunogenic compositions may also be selected to provide protection against an increased range of S. pneumoniae serotypes and strain isolates. For example, the immunogenic composition may comprise a first and second S. pneumoniae AI protein, wherein a full length polynucleotide sequence encoding for the first S. pneumoniae AI protein is not present in a genome comprising a full length polynucleotide sequence encoding for the second S. pneumoniae AI protein. In addition, each antigen selected for use in the immunogenic compositions will preferably be present in the genomes of multiple S. pneumoniae serotypes and strain isolates. Preferably, each antigen is present in the genomes of at least two (i.e., 3, 4, 5, 6, 7, 8, 9, 10, or more) S. pneumoniae strain isolates. More preferably, each antigen is present in the genomes of at least two (i.e., at least 3, 4, 5, or more) S. pneumoniae serotypes.

[0133] The immunogenic compositions may also be selected to provide protection against an increased range of serotypes and strain isolates of a Gram positive bacteria. For example, the immunogenic composition may comprise a first and second Gram positive bacteria AI protein, wherein a full length polynucleotide sequence encoding for the first Gram positive bacteria AI protein is not present in a genome comprising a full length polynucleotide sequence encoding for the second Gram positive bacteria AI protein. In addition, each antigen selected for use in the immunogenic compositions will preferably be present in the genomes of multiple serotypes and strain isolates of the Gram positive bacteria. Preferably, each antigen is present in the genomes of at least two (i.e., 3, 4, 5, 6, 7, 8, 9, 10, or more) Gram positive bacteria strain isolates. More preferably, each antigen is present in the genomes of at least two (i.e., at least 3, 4, 5, or more) Gram positive bacteria serotypes. One or both of the first and second AI proteins may preferably be in oligomeric or hyperoligomeric form.

[0134] Adhesin island surface proteins from two or more Gram positive bacterial genus or species may be combined to provide an immunogenic composition for prophylactic or therapeutic treatment of disease or infection of two more Gram positive bacterial genus or species. Optionally, the adhesin island surface proteins may be associated together in an oligomeric or hyperoligomeric structure.

[0135] In one embodiment, the invention comprises adhesin island surface proteins from two or more Streptococcus species. For example, the invention includes a composition comprising a GBS AI surface protein and a GAS adhesin island surface protein. As another example, the invention includes a composition comprising a GAS adhesin island surface protein and a S. pneumoniae adhesin island surface protein. One or both of the GAS AI surface protein and the S. pneumoniae AI surface protein may be in oligomeric or hyperoligomeric form. As a further example, the invention includes a composition comprising a GBS adhesin island surface protein and a S. pneumoniae adhesin island surface protein.

[0136] In one embodiment, the invention comprises an adhesin island surface protein from two or more Gram positive bacterial genus. For example, the invention includes a composition comprising a Streptococcus adhesin island protein and a Corynebacterium adhesin island protein. One or more of the Gram positive bacteria AI surface proteins may be in an oligomeric or hyperoligomeric form.

[0137] In addition, the AI polynucleotides and amino acid sequences of the invention may also be used in diagnostics to identify the presence or absence of GBS (or a Gram positive bacteria) in a biological sample. They may be used to generate antibodies which can be used to identify the presence of absence of an AI protein in a biological sample or in a prophylactic or therapeutic treatment for GBS (or a Gram positive bacterial) infection. Further, the AI polynucleotides and amino acid sequences of the invention may also be used to identify small molecule compounds which inhibit or decrease the virulence associated activity of the AI.

[0138] In certain preferred aspects, the invention comprises three antigens wherein each antigen is selected from a different adhesin island AI-1 (PI-1), AI2 subgroup 1 (PI-2a), and AI2 subgroup 2 (PI-2b). In preferred embodiments, the antigen from AI-1 is the backbone pilin antigen (GBS80 or variants thereof). In preferred embodiments, the antigen from AI-2 subgroup 1 is the anciliary pilin 1 antigen (GBS67 or variants thereof). In preferred embodiments, the antigen from AI-2 subgroup 2 is the backbone pilin antigen. In preferred embodiments, the three antigens are in a vaccine composition that may be used to provoke an antibody response in a mammal or for providing broad range protection against GBS infection in a mammal (in each case preferably a human). The antigens may be in any form as disclosed throughout this specification (e.g., full length, fragments that are antigenic, immunogenic or otherwise can be bound by an antibody that binds the naturally occurring full length antigen from which they are derived). The three antigens may also be used in the preparation of medicaments as disclosed throughout this specification. As discussed more fully below, the vaccine and medicaments may further comprise an adjuvant. The various compositions including these three antigens may be used in the methods and for the uses as disclosed further below (e.g., methods of administration).

### BRIEF DESCRIPTION OF THE FIGURES

[0139] FIG. 1 presents a schematic depiction of GBS Adhesin Island 1 (“AI-1”) comprising open reading frames for GBS 80, GBS 52, SAG0647, SAG0648 and GBS 104.

[0140] FIG. 2 illustrates the identification of AI-1 sequences in several GBS serotypes and strain isolates (GBS serotype V, strain isolate 2603; GBS serotype III, strain isolate nem316; GBS serotype II, strain isolate 18RS21; GBS serotype V, strain isolate CJB111; GBS serotype III, strain isolate COH1 and GBS serotype 1a, strain isolate A909). (An AI-1 was not identified in GBS serotype 1b, strain isolate H36B or GBS serotype 1a, strain isolate 515).

[0141] FIG. 3 presents a schematic depiction of the correlation between AI-1 and the Adhesin Island 2 (“AI-2”) within the GBS serotype V, strain isolate 2603 genome. (This AI-2 comprises open reading frames for GBS 67, GBS 59, SAG1406, SAG1405 and GBS 150).

[0142] FIG. 4 illustrates the identification of AI-2 comprising open reading frames encoding for GBS 67, GBS 59, SAG1406, SAG1404 and GBS 150 (or sequences having sequence homology thereto) in several GBS serotypes and strain isolates (GBS serotype V, strain isolate 2603; GBS serotype III, strain isolate NEM316; GBS serotype 1b, strain isolate H36B; GBS serotype V, strain isolate CJB111; GBS serotype II, strain isolate 18RS21; and GBS serotype 1a, strain isolate 515). FIG. 4 also illustrates the identification of AI-2 comprising open reading frames encoding for 01520 (a sortase), 01521, 01522 (a sortase), 01523 (spb1), 01524 and 01525 (or sequences having sequence homology thereto).

[0143] FIG. 5 presents data showing that GBS 80 binds to fibronectin and fibrinogen in ELISA.

[0144] FIG. 6 illustrates that all genes in AI-1 are co-transcribed as an operon.

[0145] FIG. 7 presents schematic depictions of in-frame deletion mutations within AI-1.

[0146] FIG. 8 presents FACS data showing that GBS 80 is required for surface localization of GBS 104.

[0147] FIG. 9 presents FACS data showing that sortases SAG0647 and SAG0648 play a semi-redundant role in surface exposure of GBS 80 and GBS 104.

[0148] FIG. 10 presents Western Blots of the in-frame deletion mutants probed with anti-GBS80 and anti-GBS 104 antisera.

[0149] FIG. 11: Electron micrograph of surface exposed pili structures in Streptococcus agalactiae containing GBS 80.

[0150] FIG. 12: PHD predicted secondary structure of GBS 067.

[0151] FIGS. 13, 14 and 15: Electron micrographs of surface exposed pili structures of strain isolate COH1 of Streptococcus agalactiae containing a plasmid insert encoding GBS 80.

[0152] FIGS. 16 and 17: Electron micrographs of surface exposed pili structure of wild type strain isolate COH1 of Streptococcus agalactiae.

[0153] FIG. 18: Alignment of polynucleotide sequences of AI-1 from serotype V, strain isolates 2603 and CJB111; serotype II, strain isolate 8 RS21; serotype strain isolates COH1 and NEM316; and serotype 1a, strain isolate A909.

[0154] FIG. 19: Alignment of polynucleotide sequences of AI-2 from serotype V, strain isolates 2603 and CJB111; serotype II, strain isolate 18RS21; serotype 1b, strain isolate H36B; and serotype 1a, strain isolate 515.

[0155] FIG. 20: Alignment of polynucleotide sequences of AI-2 from serotype V, strain isolate 2603 and serotype III, strain isolate NEM316.

[0156] FIG. 21: Alignment of polynucleotide sequences of AI-2 from serotype III, strain isolate COH1 and serotype Ia, strain isolate A909.

[0157] FIG. 22: Alignment of amino acid sequences of AI-1 surface protein GBS 80 from serotype V, strain isolates 2603 and CJB111; serotype 1a, strain isolate A909; serotype III, strain isolates COH1 and NEM316.

[0158] FIG. 23: Alignment of amino acid sequences of AI-1 surface protein GBS 104 from serotype V, strain isolates 2603 and CJB111; serotype III, strain isolates COH1 and NEM316; and serotype II, strain isolate 18RS21.

[0159] FIG. 24: Alignment of amino acid sequences of AI-2 surface protein GBS 067 from serotype V, strain isolates 2603 and CJB 111; serotype 1a, strain isolate 515; serotype II, strain isolate 18RS21; serotype Ib, strain isolate H36B; and serotype III, strain solate NEM316.

[0160] FIG. 25: Illustrates that GBS closely associates with tight junctions and cross the monolayer of ME180 cervical epithelial cells by a paracellular route.

[0161] FIG. 26: Illustrates GBS infection of ME180 cells.

[0162] FIG. 27: Illustrates that GBS 80 recombinant protein does not bind to epithelial cells.

[0163] FIG. 28: Illustrates that deletion of GBS 80 does not effect the capacity of GBS strain 2603 V/R to adhere and invade ME180 cervical epithelial cells.

[0164] FIG. 29: Illustrates binding of recombinant GBS 104 protein to epithelial cells.

[0165] FIG. 30: Illustrates that deletion of GBS 104 in the GBS strain COH1, reduces the capacity of GBS to adhere to ME180 cervical epithelial cells.

[0166] FIG. 31: Illustrates that GBS 80 knockout mutant strain partially loses the ability to translocate through an epithelial cell monolayer.

[0167] FIG. 32: Illustrates that deletion of GBS 104, but not GBS 80, reduces the capacity of GBS to invade J774 macrophage-like cell line.

[0168] FIG. 33: Illustrates that GBS 104 knockout mutant strain translocates through an epithelial monolayer less efficiently than the isogenic wild type.

[0169] FIG. 34: Negative stained electron micrographs of GBS serotype III, strain isolate COH1, containing a plasmid insert to over-express GBS 80.

[0170] FIG. 35: Electron micrographs of surface exposed pili structures on GBS serotype III, strain isolate COH1, containing a plasmid insert to over-express GBS 80, stained with anti-GBS 80 antibodies (visualized with 10 nm gold particles).

[0171] FIG. 36: Electron micrographs of surface exposed pili structures on GBS serotype III, strain isolate COH1, containing a plasmid insert to over-express GBS 80, stained with anti-GBS 80 antibodies (visualized with 10 nm gold particles).

[0172] FIG. 37: Electron micrographs of surface exposed pili structures on GBS serotype III, strain isolate COH1, containing a plasmid insert to over-express GBS 80, stained with anti-GBS 80 antibodies (visualized with 20 n m gold particles).

[0173] FIG. 38: Electron micrographs of surface exposed pili structures on GBS serotype III, strain isolate COH1, containing a plasmid insert to over-express GBS 80, stained with anti-GBS 104 antibodies or preimmune sera (visualized with 10 nm gold particles).

[0174] FIG. 39: Electron micrographs of surface exposed pili structures on GBS serotype III, strain isolate COH1, containing a plasmid insert to over-express GBS 80, stained with anti-GBS 80 antibodies (visualized with 20 nm gold particles) and anti-GBS 104 antibodies (visualized with 10 nm gold particles).

[0175] FIG. 40: Electron micrographs of surface exposed pili structures on GBS serotype III, strain isolate COH1, containing a plasmid insert to over-express GBS 80, stained with anti-GBS 80 antibodies (visualized with 20 nm gold particles) and anti-GBS 104 antibodies (visualized with 10 nm gold particles).

[0176] FIG. 41: Illustrates that GBS 80 is necessary for polymer formation and GBS104 and sortase SAG0648 are necessary for efficient assembly of pili.

[0177] FIG. 42: Illustrates that GBS 67 is part of a second pilus and that GBS 80 is polymerized in strain 515.

[0178] FIG. 43: Illustrates that two macro-molecules are visible in Cohl, one of which is the GBS 80 pilin.

[0179] FIG. 44: Illustrates pilin assembly.

[0180] FIG. 45: Illustrates that GBS 52 is a minor component of the GBS pilus.

[0181] FIG. 46: Illustrates that the pilus is found in the supernatant of a bacterial culture.

[0182] FIG. 47: Illustrates that the pilus is found in the supernatant of bacterial cultures in all phases.

[0183] FIG. 48: Illustrates that in Cohl, only the GBS 80 protein and one sortase (sag0647 or sag0648) is required for polymerization.

[0184] FIG. 49: IEM image of GBS 80 staining of a GBS serotype VIII strain JM9030013 that express pili.

[0185] FIG. 50: IEM image of GBS 104 staining of a GBS serotype VIII strain JM9030013 that express pili.

[0186] FIG. 51A: Schematic depiction of open reading frames comprising GAS AI-2 serotype M1 isolate, GAS AI-3 serotype M3, M5, M18, and M49 isolates, a GAS AI-4 serotype M12 isolate, and an GAS AI-1 serotype M6 isolate.

[0187] FIG. 51B: Amino acid alignment of SrtC1-type sortase of a GAS AI-2 serotype M1 isolate, SrtC2-type sortases of serotype M3, M5, M18, and M49 isolates, and a SrtC2-type sortase of a GAS AI-4 serotype M12 isolate.

[0188] FIG. 52: Amino acid alignment of the capsular polysacharide adhesion proteins of GAS AI-4 serotype M12 (A735), GAS AI-3 serotype M5 (Manfredo), S. pyogenes strain MGAS315 serotype M3, S. pyogenes strain SSI-1 serotype M3, S. pyogenes strain MGAS8232 serotype M3, and GAS AI-2 serotype M1.

[0189] FIG. 53: Amino acid alignment of F-like fibronectin-binding roteins of GAS AI-4 serotype M12 (A735) and S. pyogenes strain MGAS10394 serotype M6.

[0190] FIG. 54: Amino acid alignment of F2-like fibronectin-binding proteins of GAS AI-4 serotype M12 (A735), S. pyogenes strain MGAS8232 serotype M3, GAS AI-3 strain M5 (Manfredo), S. pyogenes strain SSI serotype M3, and S. pyogenes stain MGAS315 serotype M3.

[0191] FIG. 55: Amino acid alignment of fimbrial proteins of GAS AI-4 serotype M12 (A735), GAS AI-3 serotype M5 (Manfredo), S. pyogenes strain MGAS315 serotype M3, S. pyogenes strain SSI serotype M3, S. pyogenes strain MGAS8232 serotype M3, and S. pyogenes M1 GAS serotype M1.

[0192] FIG. 56: Amino acid alignment of hypothetical proteins of GAS AI-4 serotype M12 (A735), S. pyogenes strain MGAS315 serotype M3, S. pyogenes strain SSI-1 serotype M3, GAS AI-3 serotype M5 (Manfredo), and S. pyogenes strain MGAS8232 serotype M3.

[0193] FIG. 57: Results of FASTA homology search for amino acid sequences that align with the collagen adhesion protein of GAS AI-1 serotype M6 (MGAS10394).

[0194] FIG. 58: Results of FASTA homology search for amino acid sequences that align with the fimbrial structural subunit of GAS AI-1 serotype M6 (MGAS10394).

[0195] FIG. 59: Results of FASTA homology search for amino acid sequences that align with the hypothetical protein of GAS AI-2 serotype M1 (SF370).

[0196] FIG. 60: Specifies pilin and E box motifs present in GAS type 3 and 4 adhesin islands.

[0197] FIG. 61: Illustrates that surface expression of GBS 80 protein on GBS strains COH and JM9130013 correlates with formation of pili structures. Surface expression of GBS 80 was determined by FACS analysis using an antibody that cross-hybridizes with GBS 80. Formation of pili structures was determined by immunogold electron microscopy using gold-labelled anti-GBS 80 antibody.

[0198] FIG. 62: Illustrates that surface exposure is capsule-dependent for GBS 322 but not for GBS 80.

[0199] FIG. 63: Illustrates the amino acid sequence identity of GBS 59 proteins in GBS strains.

[0200] FIG. 64: Western blotting of whole GBS cell extracts with anti-GBS 59 antibodies.

[0201] FIG. 65: Western blotting of purified GBS 59 and whole GBS cell extracts with anti-GBS 59 antibodies.

[0202] FIG. 66: FACS analysis of GBS strains CJB111, 7357B, 515 using GBS 59 antiserum.

[0203] FIG. 67: Illustrates that anti-GBS 59 antibodies are opsonic for CJB111 GBS strain serotype V.

[0204] FIG. 68: Western blotting of GBS strain JM9130013 total extracts.

[0205] FIG. 69: Western blotting of GBS stain 515 total extracts shows that GBS 67 and GBS 150 are parts of a pilus.

[0206] FIG. 70: Western blotting of GBS strain 515 knocked out for GBS 67 expression

[0207] FIG. 71: FACS analysis of GBS strain 515 and GBS strain 515 knocked out for GBS 67 expression using GBS 67 and GBS 59 antiserum.

[0208] FIG. 72: Illustrates complementation of GBS 515 knocked out for GBS 67 expression with a construct overexpressing GBS 80.

[0209] FIG. 73: FACS analysis of GAS serotype M6 for spyM6_{—}0159 surface expression.

[0210] FIG. 74: FACS analysis of GAS serotype M6 for spyM6_{—}0160 surface expression.

[0211] FIG. 75: FACS analysis of GAS serotype M1 for GAS 15 surface expression.

[0212] FIG. 76: FACS analysis of GAS serotype M1 for GAS 16 surface expression using a first anti-GAS 16 antiserum.

[0213] FIG. 77: FACS analysis of GAS serotype M1 for GAS 18 surface expression using a first anti-GAS 18 antiserum.

[0214] FIG. 78: FACS analysis of GAS serotype M1 for GAS 18 surface expression using a second anti-GAS 18 antiserum.

[0215] FIG. 79: FACS analysis of GAS serotype M1 for GAS 16 surface expression using a second anti-GAS 16 antisera.

[0216] FIG. 80: FACS analysis of GAS serotype M3 for spyM3_{—}0098 surface expression.

[0217] FIG. 81: FACS analysis of GAS serotype M3 for spyM3_{—}0100 surface expression.

[0218] FIG. 82: FACS analysis of GAS serotype M3 for spyM3_{—}0102 surface expression.

[0219] FIG. 83: FACS analysis of GAS serotype M3 for spyM3_{—}0104 surface expression.

[0220] FIG. 84: FACS analysis of GAS serotype M3 for spyM3_{—}0106 surface expression.

[0221] FIG. 85: FACS analysis of GAS serotype M12 for 19224134 surface expression.

[0222] FIG. 86: FACS analysis of GAS serotype M12 for 19224135 surface expression.

[0223] FIG. 87: FACS analysis of GAS serotype M12 for 19224137 surface expression.

[0224] FIG. 88: FACS analysis of GAS serotype M12 for 19224141 surface expression.

[0225] FIG. 89: Western blot analysis of GAS 15 expression on GAS M1 bacteria.

[0226] FIG. 90: Western blot analysis of GAS 15 expression using GAS 15 immune sera.

[0227] FIG. 91: Western blot analysis of GAS 15 expression using GAS 15 pre-immune sera.

[0228] FIG. 92: Western blot analysis of GAS 16 expression on GAS M1 bacteria.

[0229] FIG. 93: Western blot analysis of GAS 16 expression using GAS 16 immune sera.

[0230] FIG. 94: Western blot analysis of GAS 16 expression using GAS 16 pre-immune sera.

[0231] FIG. 95: Western blot analysis of GAS 18 on GAS M1 bacteria.

[0232] FIG. 96: Western blot analysis of GAS 18 using GAS 18 immune sera.

[0233] FIG. 97: Western blot analysis of GAS 18 using GAS 18 pre-immune sera.

[0234] FIG. 98: Western blot analysis of M6_Spy0159 expression on GAS bacteria.

[0235] FIG. 99: Western blot analysis of 19224135 expression on M12 GAS bacteria.

[0236] FIG. 100: Western blot analysis of 19224137 expression on M12 GAS bacteria.

[0237] FIG. 101: Full length nucleotide sequence of an S. pneumoniae strain 670 AI.

[0238] FIG. 102: Western blot analysis of GAS 15, GAS 16, and GAS 18 in GAS M1 strain 2580.

[0239] FIG. 103: Western blot analysis of GAS 15, GAS 16, and GAS 18 in GAS M1 strain 2913.

[0240] FIG. 104: Western blot analysis of GAS 15, GAS 16, and GAS 18 in GAS M1 strain 3280.

[0241] FIG. 105: Western blot analysis of GAS 15, GAS 16, and GAS 18 in GAS M1 strain 3348.

[0242] FIG. 106: Western blot analysis of GAS 15, GAS 16, and GAS 18 in GAS M1 strain 2719.

[0243] FIG. 107: Western blot analysis of GAS 15, GAS 16, and GAS 18 in GAS M1 strain SF370.

[0244] FIG. 108: Western blot analysis of 19224135 and 19224137 in GAS M12 strain 2728.

[0245] FIG. 109: Western blot analysis of 19224139 in GAS M12 strain 2728 using antisera raised against SpyM3_{—}0102.

[0246] FIG. 110: Western blot analysis of M6_Spy0159 and M6_Spy0160 in GAS M6 strain 2724.

[0247] FIG. 111: Western blot analysis of M6_Spy0159 and M6_Spy0160 in GAS M6 strain SF370.

[0248] FIG. 112: Western blot analysis of M6_Spy160 in GAS M6 strain 2724.

[0249] FIGS. 113-115: Electron micrographs of surface exposed GAS 15 on GAS M1 strain SF370.

[0250] FIGS. 116-121: Electron micrographs of surface exposed GAS 16 on GAS M1 strain SF370.

[0251] FIGS. 122-125: Electron micrographs of surface exposed GAS 18 on GAS M1 strain SF370 detected using anti-GAS 18 antisera.

[0252] FIG. 126: IEM image of a hyperoligomer on GAS M1 strain SF370 detected using anti-GAS 18 antisera.

[0253] FIGS. 127-132: IEM images of oligomeric and hyperoligomeric structures containing M6_Spy0160 extending from the surface of GAS serotype M6 3650.

[0254] FIGS. 133A and B: Western blot analysis of L. lactis transformed to express GBS 80 with anti-GBS 80 antiserum.

[0255] FIGS. 134: Western blot analyses of L. lactis transformed to express GBS AI-1 with anti-GBS 80 antiserum.

[0256] FIG. 135: Ponceau staining of same acrylamide gel as used in FIG. 134.

[0257] FIG. 136A: Western blot analysis of sonicated pellets and supernatants of cultured L. lactis transformed to express GBS AI-1 polypeptides using anti-GBS 80 antiserum.

[0258] FIG. 136B: Polyacrylamide gel electrophoresis of sonicated pellets and supernatants of cultured L. lactis transformed to express GBS AI polypeptides.

[0259] FIG. 137: Depiction of an example S. pneumoniae AI locus.

[0260] FIG. 138: Schematic of primer hybridization sites within the S. pneumoniae AI locus of FIG. 137.

[0261] FIG. 139A: The set of amplicons produced from the S. pneumoniae strain TIGR4 AI locus.

[0262] FIG. 139B: Base pair lengths of amplicons produced from FIG. 139A primers in S. pneumoniae strain TIGR4.

[0263] FIG. 140: CGH analysis of S. pneumoniae strains for the AI locus.

[0264] FIG. 141: Amino acid sequence alignment of polypeptides encoded by AI orf 2 in S. pneumoniae AI-positive strain.

[0265] FIG. 142: Amino acid sequence alignment of polypeptides encoded by AI orf 3 in S. pneumoniae AI-positive strains.

[0266] FIG. 143: Amino acid sequence alignment of polypeptides encoded by AI orf 4 in S. pneumoniae Al-positive strains.

[0267] FIG. 144: Amino acid sequence alignment of polypeptides encoded by AI orf 5 in S. pneumoniae AI-positive strains.

[0268] FIG. 145: Amino acid sequence alignment of polypeptides encoded by AI orf 6 in S. pneumoniae AI-positive strains.

[0269] FIG. 146: Amino acid sequence alignment of polypeptides encoded by AI orf 7 in S. pneumoniae AI-positive strains.

[0270] FIG. 147: Amino acid sequence alignment of polypeptides encoded by AI orf 8 in S. pneumoniae Al-positive strains.

[0271] FIG. 148: Diagram comparing amino acid sequences of RrgA in S. pneumoniae strains.

[0272] FIG. 149: Amino acid sequence comparison of RrgB S. pneumoniae strains.

[0273] FIG. 150A: Sp0462 amino acid sequence.

[0274] FIG. 150B: Primers used to produce a clone encoding the Sp0462 polypepide.

[0275] FIG. 151A: Schematic depiction of recombinant Sp0462 polypeptide.

[0276] FIG. 151B: Schematic depiction of full-length Sp0462 polypeptide.

[0277] FIG. 152A: Western blot probed with serum obtained from S. pneumoniae-infected patients for Sp0462.

[0278] FIG. 152B: Western blot probed with GBS 80 serum for Sp0462.

[0279] FIG. 153A: Sp0463 amino acid sequence.

[0280] FIG. 153B: Primers used to produce a clone encoding the Sp0463 polypeptide.

[0281] FIG. 154A: Schematic depiction of recombinant Sp0463 polypeptide.

[0282] FIG. 154B: Schematic depiction of full-length Sp0463 polypeptide.

[0283] FIG. 155: Western blot detection of recombinant Sp0463 polypeptide.

[0284] FIG. 156: Western blot detection of high molecular weight Sp0463 polymers.

[0285] FIG. 157A: Sp0464 amino acid sequence.

[0286] FIG. 157B: Primers used to produce a clone encoding the Sp0464 polypeptide.

[0287] FIG. 158A: Schematic depiction of recombinant Sp0464 polypeptide.

[0288] FIG. 158B: Schematic depiction of full-length Sp0464 polypeptide.

[0289] FIG. 159: Western blot detection of recombinant Sp0464 polypeptide.

[0290] FIG. 160: Amplification products prepared for production of Sp0462, Sp0463, and Sp0464 clones.

[0291] FIG. 161: Opsonic killing by anti-sera raised against L. lactis expressing GBS AI

[0292] FIG. 162: Schematic depicting GAS adhesin islands GAS AI-1, GAS AI-2, GAS AI-3 and GAS AI-4.

[0293] FIGS. 163A-D: Immunoblots of cell-wall fractions of GAS strains with antisera specific for LPXTG proteins of M6_ISS3650 (A), M1_SF370 (B), M5_ISS4883 (C) and M12_{—}20010296 (D).

[0294] FIGS. 163 E-H: Immunoblots of cell-wall fractions of deletion mutants M1_SF370Δ128 (E) M1_SF370Δ130 (F) M1_SF370ΔSrtC1 (G) and the M1_{—}128 deletion strain complemented with plasmid pAM::128 which contains the M1_{—}128 gene (H) with antisera specific for the pilin components of M1_SF370.

[0295] FIGS. 163 I-N: Immunogold labelling and transmission electron microscopy of: T6 (I) and Cpa (J) in M6_ISS3650; M1_{—}128 in M1_SF370 (K) and deletion strain M1_SF370Δ128 (N); M5_orf80 in M5_ISS4883 (L); M12_EftLSEA in M12_{—}20010296 (M). The strains used are indicated below the panels. Bars=200 nm.

[0296] FIG. 164: Schematic representation of the FCT region from 7 GAS strains

[0297] FIGS. 165A-H: Flow cytometry of GAS bacteria treated or not with trypsin and stained with sera specific for the major pilus component. Preimmune staining; black lines, untreated bacteria; green lines and trypsin treated bacteria; blue lines. M6_{—}1553650 stained with sera which recognize the M6 protein (A) or anti-M6_T6 (B), M1_SF370 stained with anti-M1 (C) or anti-M1_{—}128 (D), M5_ISS4883 stained with anti-PrtF (E) or anti-M5_orf80 (F) and M12_{—}20010296 with anti-M12 (G) or anti-EftLSL.A (H)

[0298] FIGS. 166A-C: Immunoblots of recombinant pilin components with polyvalent Lancefield T-typing sera. The recombinant proteins are shown above the blot and the sera pool used is shown below the blot.

[0299] FIGS. 166 D-G: Immunoblots of pilin proteins with monovalent T-typing sera. The recombinant proteins are shown below the blot and the sera used above the blot.

[0300] FIG. 166 H and I Flow cytometry analysis of strain M1_SF370 (H) and the deletion strain M1_SF370Δ128 (I) with T-typing antisera pool T.

[0301] FIG. 167: Chart describing the number and type of sortase sequences identified within GAS AIs.

[0302] FIG. 168A: Immunogold-electronmicroscopy of L. lactis lacking an expression construct for GBS AI-1 using anti-GBS 80 antibodies.

[0303] FIGS. 168B and C: Immunogold-electronmicroscopy detects GBS 80 in oligomeric (pilus) structures on surface of L. lactis transformed to express GBS AI-1

[0304] FIG. 169: FACS analysis detects expression of GBS 80 and GBS 104 on the surface of L. lactis transformed to express GBS AI-1.

[0305] FIG. 170: Phase contrast microscopy and immuno-electronmicroscopy shows that expression of GBS AI-1 in L. lactis induces L. lactis aggregation.

[0306] FIG. 171: Purification of GBS pili from L. lactis transformed to express GBS AI-1.

[0307] FIG. 172: Schematic depiction of GAS M6 (AI-1), M1 (AI-2), and M12 (AI-4) adhesin islands and portions of the adhesin islands inserted in the pAM401 construct for expression in L. lactis.

[0308] FIG. 173A-C: Western blot analysis showing assembly of GAS pili in L. lactis expressing GAS AI-2 (M1) (A), GAS AI-4 (M12) (B), and GAS AI-1 (M6) (C).

[0309] FIG. 174: FACS analysis of GAS serotype M6 for M6_Spy0157 surface expression.

[0310] FIG. 175: FACS analysis of GAS serotype M12 for 19224139 surface expression.

[0311] FIG. 176A-E: Immunogold electron microscopy using antibodies against M6_Spy0160 detects pili on the surface of M6 strain 2724.

[0312] FIG. 176 F: Immunogold electron microscopy using antibodies against M6_Spy0159 detects M6_Spy0159 surface expression on M6 strain 2724.

[0313] FIG. 177A-C: Western blot analysis of M1 strain SF370 GAS bacteria individually deleted for M1_{—}130, SrtC1, or M1_{—}128 using anti-M1_{—}130 serum (A), anti-M1_{—}128 serum (B), and anti-M1_{—}126 serum (C).

[0314] FIG. 178A-C: Immunogold electron microscopy using antibodies against M1_{—}128 to detect surface expression on wildtype strain SF370 bacteria (A), M1_{—}128 deleted SF370 bacteria (B), and SrtC1 deleted SF370 bacteria (C).

[0315] FIG. 179A-C: FACS analysis to detect expression of M1_{—}126 (A), M1_{—}128 (B), and M1_{—}130 (C) on the surface of wildtype SF370 GAS bacteria.

[0316] FIG. 179 D-F: FACS analysis to detect expression of M1_{—}126 (D), M1_{—}128 (E), and M1_{—}130 (F) on the surface of M1_{—}128 deleted SF370 GAS bacteria.

[0317] FIG. 179 G-I: FACS analysis to detect expression of M1_{—}126 (G), M1_{—}128 (H), and M1_{—}130 (I) on the surface of SrtC1 deleted SF370 GAS bacteria.

[0318] FIG. 180A and B: FACS analysis of wildtype (A) and LepA deletion mutant (B) strains of SF370 bacteria for M1 surface expression.

[0319] FIG. 181: Western blot analysis detects high molecular weight polymers in S. pneumoniae TIGR4 using anti-RrgB antisera.

[0320] FIG. 182: Detection of high molecular weight polymers in S. pneumoniae rlrA positive strains.

[0321] FIG. 183: Detection of high molecular weight polymers in S. pneumoniae TIGR4 by silver staining and Western blot analysis using anti-RrgB antisera.

[0322] FIG. 184: Deletion of S. pneumoniae TIGR4 adhesin island sequences interferes with the ability of S. pneumoniae to adhere to A549 alveolar cells.

[0323] FIG. 185: Negative staining of S. pneumoniae strain TIGR4 showing abundant pili on the bacterial surface.

[0324] FIG. 186: Negative staining of strain TIGR4 deleted for rrgA-srtD adhesin island sequences showing no pili on the bacterial surface

[0325] FIG. 187: Negative staining of the TIGR4 mgrA mutant showing abundant pili on the bacterial surface.

[0326] FIG. 188: Negative staining of the negative control TIGR4 mgrA mutant deleted for adhesin island sequences rrgA-srtD showing no pili on the bacterial surface.

[0327] FIG. 189: Immuno-gold labelling of S. pneumoniae strain TIGR4 grown on blood agar solid medium using α-RrgB (5 nm) and α-RrgC (10 nm). Bar represents 200 nm.

[0328] FIGS. 190A and B: Detection of expression and purification of S. pneumoniae RrgA protein by SDS-PAGE (A) and Western blot analysis (B).

[0329] FIG. 191: Detection of RrgB by antibodies produced in mice.

[0330] FIG. 192: Detection of RrgC by antibodies produced in mice.

[0331] FIG. 193: Purification of S. pneumoniae TIGR 4 pili by a cultivation and digestion method and detection of the purified TIGR4 pili.

[0332] FIG. 194: Purification of S. pneumoniae TIGR 4 pili by a sucrose gradient centrifugation method and detection of the purified TIGR4 pili.

[0333] FIG. 195: Purification of S. pneumoniae TIGR 4 pili by a gel filtration method and detection of the purified TIGR4 pili.

[0334] FIG. 196: Alignment of full length S. pneumoniae adhesin island sequences S. pneumoniae strains.

[0335] FIG. 197A: Schematic of GBS AI-1 coding sequences.

[0336] FIG. 197B: Nucleotide sequence of intergenic region between AraC and GBS 80 (SEQ ID NO:273.

[0337] FIG. 197C: FACS analysis results for GBS 80 expression GBS strains having different length polyA tracts in the intergenic region between AraC and GBS 80.

[0338] FIG. 198: Table comparing the percent identity of surface proteins encoded by a serotype M6 (harbouring a GAS AI-1) adhesin island relative to other GAS serotypes harbouring an adhesin island.

[0339] FIG. 199: Table comparing the percent identity of surface proteins encoded by a serotype M1 (harbouring a GAS AI-2) adhesin island relative to other GAS serotypes harbouring an adhesin island.

[0340] FIG. 200: Table comparing the percent identity of surface proteins encoded by serotypes M3, M18, M5, and M49 (harbouring GAS AI-3) adhesin islands relative to other GAS serotypes harbouring an adhesin island.

[0341] FIG. 201: Table comparing the percent identity of surface proteins encoded by a serotype M12 (harbouring a GAS AI-1) adhesin island- relative to other GAS serotypes harbouring an adhesin island.

[0342] FIG. 202: GBS 80 recombinant protein does not bind to epithelial cells. Epithelial cells were incubated in the presence or absence of GBS80 protein and then a mouse a-GBS80 polyclonal antibody added. The cell were then stained with FITC-conjugated a-mouse IgG antibody. The violet area indicates cells treated with FITC-conjugated antibody alone. GBS80 binding, expressed as Dₑₘₑₐₙ channel values, was measured by FACScan cytometer as difference in fluorescence intensity between cell incubated with or without GBS80. The same protocol was used for GBS 104 protein binding to epithelial cells.

[0343] FIG. 203: Deletion of GBS 80 protein does not affect the ability of GBS to adhere and invade ME180 cervical epithelial cells. ME180 cervical carcinoma epithelial cells were infected with GBS 2603 wild type or 2603 D80 isogenic mutant. After 2 h infection, non-adherent bacteria were washed off and infection prolonged for further 2 h and 4 h. In invasion experiments, after each time point followed a 2 h antibiotic treatment. Cells were then lysed with 1% saponin and lysates plated on TSA plates.

[0344] FIG. 204: GBS 80 binds to extracellular matrix proteins. ELISA with purified ECM components and native GBS80 protein.

[0345] FIG. 205: Deletion of GBS 104 protein, but not GBS 80, reduces the capacity of GBS to invade J774 macrophage-like cells. J774 cells were infected with GBS COH1 wild type or COH1DGBS104/COH1DGBS80 isogenic mutants. After 1 h infection, non-adherent bacteria were washed off and intracellular bacteria recovered at 2 h, 4 h and 6 h post-antibiotic treatment. At each time point cells were lysed with 0.25% Triton X-100 and lysates plated on TSA plates.

[0346] FIG. 206: GBS 104 knockout mutant strains of bacteria translocate through an epithelial monolayer less efficiently that the isogenic wild type strain.

[0347] FIG. 207: GBS 80 knockout mutant strains of bacteria partially lose the ability to translocate through an epithelial monolayer. Epithelial cells monolayers were inoculated with each bacterium in the apical chamber of a transwell system for 2 h and then non-adherent bacteria washed off. Infection was prolonged for further 2 h and 4 h. Samples were taken from the media of the basolateral side and the number of colony forming units measured. Transepithelial electrical resistance measured prior and after infection gave comparable values, indicating the maintenance of the integrity of the monolayer.

[0348] FIG. 208: GBS adherence to HUVEC endothelial cells. HUVEC cells were infected with GBS COH1 wild type or COH1DGBS104/COH1DGBS80 isogenic mutants. After 1 h infection, non-adherent bacteria were washed off and cells lysed with 1% saponin and lysates plated on TSA plates.

[0349] FIG. 209: Strain growth rate of wildtype, GBS 80-deleted, or GBS 104 deleted COH1 GBS.

[0350] FIG. 210: Binding of recombinant GBS 104 protein to epithelial cells by FACS analysis.

[0351] FIG. 211: Deletion of GBS 104 protein in the GBS strain COH1 reduces the ability of GBS to adhere to ME180 cervical epithelial cells. ME180 cervical carcinoma epithelial cells were infected with GBS COH1 wild type or COH1DGBS104/COH1DGBS80 isogenic mutants. After 1 h infection, non-adherent bacteria were washed off and cells lysed with 1% saponin and lysates plated on TSA plates.

[0352] FIG. 212: COH1 strain GBS overexpressing GBS 80 protein has an impaired capacity to translocate through an epithelial monolayer.

[0353] FIG. 213: Scanning electron microscopy shows that overexpression of GBS 80 protein on COH1 strain GBS enhances the capacity of the COH1 bacteria to form microcolonies on epithelial cells.

[0354] FIG. 214: Confocal imaging shows that overexpression of GBS 80 proteins on COH1 strain GBS enhances the capacity of the COH1 bacteria to form microcolonies on epithelial cells.

[0355] FIG. 215: Detection of GBS 59 on the surface of GBS strain 515 by immuno-electron microscopy.

[0356] FIG. 216: Detection of GBS 67 on the surface of GBS strain 515 by immuno-electron microscopy.

[0357] FIG. 217: GBS 67 binds to fibronectin.

[0358] FIG. 218: Western blot analysis shows that deletion of both GBS AI-2 sortase genes abolishes assembly of the pilus.

[0359] FIG. 219: FACS analysis shows that deletion of both GBS AI-2 sortase genes abolishes assembly of the pilus.

[0360] FIG. 220A-C: Western blot analysis shows that GBS 59, GBS 67, and GBS 150 form high molecular weight complexes.

[0361] FIG. 221A-C: Western blot analysis shows that GBS 59 is required for polymer formation of GBS 67 and GBS 150.

[0362] FIG. 222: FACS analysis shows that GBS 59 is required for surface exposure of GBS 67.

[0363] FIG. 223: Summary Western blots for detection of GBS 59, GBS 67, or GBS 150 in GBS 515 and GBS 515 mutant strain.

[0364] FIG. 224: Description of GBS 59 allelic variants.

[0365] FIG. 225: GBS 59 is opsonic only against a strain of GBS expressing a homologous GBS 59.

[0366] FIGS. 226A and B: Results of FACS analysis for surface expression of GBS 59 using antibodies specific for different GBS 59 isoforms.

[0367] FIGS. 227A and B: Results of FACS analysis for surface expression of GBS 80, GBS 104, GBS 322, GBS 67, and GBS 59 on 41 various strains of GBS bacteria.

[0368] FIG. 228: Results of FACS analysis for surface expression of GBS 80, GBS 104, GBS 322, GBS 67, and GBS 59 on 41 strains of GBS bacteria obtained from the CDC.

[0369] FIG. 229: Expected immunogenicity coverage of different combinations of GBS 80, GBS 104, GBS 322, GBS 67, and GBS 59 across strains of GBS bacteria.

[0370] FIG. 230: GBS 59 opsonophagocytic activity is comparable to that of a mixture of GBS 80, GBS 104, GBS 322 and GBS 67.

[0371] FIG. 231A-C: Schematic presentation of example hybrid GBS AIs.

[0372] FIG. 232: Schematic presentation of an example hybrid GBS AI.

[0373] FIGS. 233A and B: Western blot and FACS analysis detect expression of GBS 80 and GBS 67 on the surface of L. lactis transformed with a hybrid GBS AI.

[0374] FIG. 234A-E Hybrid GBS AI cloning strategy.

[0375] FIG. 235: High magnification of S. pneumoniae strain TIGR4 pili double labeled with α-RrgB (5 nm) and α-RrgC (10 nm). Bar represents 100 nm.

[0376] FIG. 236: Immuno-gold labeling of the S. pneumoniae TIGR4 rrgA-srtD deletion mutant with no visible pili on the surface detectable by α-RrgB- and α-RrgC. Bar represents 200 nm.

[0377] FIG. 237: Variability in GBS 67 amino acid sequences between strains 2603 and H36B,

[0378] FIG. 238: Strain variability in GBS 67 amino acid sequences of allele I (2603).

[0379] FIG. 239: Strain variability in GBS 67 amino acid sequence of allele II (H36B).

[0380] FIG. 240: sequence identity dendrogram showing six GBS59 polypeptide allelic families.

[0381] FIG. 241. Immunogenicity of pilus subunits in humans. FIG. 241A, FACS analysis of ability of human sera to recognize whole S. pneumoniae TIGR4 cells. P=sera from patients with diagnosed pneumococcal diseases; H=serum from a healthy donor. FIG. 241B, Western blot detection of S. pneumoniae TIGR4 mutanolysin preparation by human sera. Representative results obtained with three sera are shown. The typical ladder constituted by polymers of pilus subunits, shown by silver staining (SS), is recognized by the patient's sera (P) but not by the healthy donor control (H). Electrophoretic migrations of relevant molecular mass markers are indicated on the left. FIG. 241C, ELISA quantification of specific IgG against recombinant RrgA, RrgB or RrgC in human sera from patients (P) with diagnosed pneumococcal diseases (N=9) or from a healthy donor (H) as indicated. Sera were diluted 1:500. For the sera from the patients: columns=mean of the 9 sera; bars=standard deviation.

[0382] FIG. 242. Immunogenicity of pilus subunits in mice. ELISA quantification of specific IgG titers against recombinant RrgA, RrgB or RrgC in sera of mice immunized as indicated. N=8 for each group with the exception of control group in which N=16. Specific IgG were undetectable in control group (adjuvant plus saline). Columns represent the mean of the group, with the exception of the S. pneumoniae TIGR4 vaccination group, in which sera were pooled. A+B+C=combination of RrgA+B+C ; bars=standard deviation.

[0383] FIG. 243. Protective efficacy of pilus subunits in mice. Protective efficacy against S. pneumoniae TIGR4 or 6B challenge of active vaccination with either recombinant pilus antigens or heat-inactivated S. pneumoniae TIGR4 with Freund's adjuvant or Al(OH)₃ as indicated, or passive transfer of antisera raised against the same antigens with Freund's adjuvant. N=8 for each group with the exception of control groups in the Freund's adjuvant and in the passive immunization panels, in which N=16. FIG. 243A, Bacteremia at 24 h (for S. pneumoniae TIGR4 challenge) or 5 h (for 6B challenge) post-challenge. Circles=values of CFU per ml of blood of single animals; horizontal bars=geometric mean of each group; dashed line=detection limit (i.e. no CFU were detected in blood samples below dashed line). FIG. 243B, Mortality course. Diamonds=survival days of single animals, horizontal bars=median of survival days of each group; dashed line=endpoint of observation (i.e. animals above the dashed line survived at the endpoint). ctrl=mice receiving only the corresponding adjuvant plus saline; A+B+C=combination of RrgA+B+C; *=P<0.05 and **=P<0.01, in comparison with the corresponding control group.

[0384] FIG. 244. Schematic of M2 (Adhesin-Island 5) andM4 (Adhesin-Island 6).

[0385] FIG. 245. Schematic of GAS M2 AI-5.

[0386] FIG. 246. Schematic of GAS M4 AI-6.

[0387] FIG. 247A-D. Schematic of sequence identity of AI proteins (see SEQ ID NOS:318-466).

[0388] FIG. 248 Immunoblots on cell-wall fractions and immuno-electron microscopy images of GAS strain SF370 wild type, Δspy0128, Δspy0129, Δspy0128/pAM::128, Δspy0129/pAM::129, and L. lactis strains MG1363/pAM, MG1363/pAM::pilM1. For immunoblots, sera against Cpa (GAS15), Backbone (GAS16/spy0128) and Spy0130 (GAS18) were used on cell-wall fractions of each strain. For immuno-electron microscopy bacteria were labeled with serum against Backbone. As a negative control pre-immune sera were used. Bars: 200 nm.

[0389] FIG. 249. FIGS. 249A-E, confocal microscopy images of GAS SF370 wild type, Δspy0128, Δspy0129, Δspy0128/pAM::128 and Δspy0129/pAM::129 grown to late exponential growth phase on polylysine-coated coverslips and stained with anti-GAS (blue) and anti-spy0128 (red) sera. FIGS. 249F-G, light microscopy analysis of L. lactis MG1363 strains transformed with pAM vector alone or with pAM::pilM1.

[0390] FIG. 250. Confocal microscopy images of bacterial aggregation on human pharynx cell line Detroit-562. Cell monolayers were incubated with bacteria grown to OD 0.4 at 37° C. in a 5% CO2 atmosphere; after 15 minutes of incubation wells were extensively washed 3 times with PBS to remove the unattached bacteria, and infection was let continue to 30, 60 and 120 minutes, then wells were washed again and stained with anti-phalloidin (blue) for eukaryotic cell staining and a polyclonal anti-GAS serum (green) for bacteria staining Panels A-D: SF370 wild type; panels E-H Δspy0128; panels I-L Δpy0129.

[0391] FIG. 251. FIGS. 251A-B, adherence assay with SF370 wild type, Δspy128 and Δspy0129 on Detroit-562 pharynx cell line. Confluent cell monolayers were infected with bacteria (MOI 100:1) for 5, 15, 30 and 120 minutes. The percentage of adherent bacteria was calculated as follows: (n. bacteria recovered after infection/n. inoculated bacteria)×100 and reported as real percentage (A) or as normalized percentage considering the wild type as 100% (B). FIG. 251C: Adherence assay with L. lactis transformed with pAM401 vector alone and pAM401 containing pilus region of M1 SF370 on Detroit-562 pharynx cell line. A MOI 10:1 was used to infect cells for 15 and 120 min. Each experiment was performed in triplicate and repeated three times. Means and standard deviations of three experiments are shown.

[0392] FIG. 252. Bio-film assay with SF370 wt, Δspy128, Δspy0129, Δspy128/pAM::128, Δspy0129/pAM::129 strains. Bacteria were incubated in C-medium at room temperature on 24-multi well plates and at the indicated time points supernatant were removed and adherent bacteria were stained with crystal violet 0.2%. Photograph (A) and quantification by measurement of OD at 540 nm (B) of bacterial adhesion after 24 h incubation. Bacterial growth in the same conditions for 24 h was also checked as a control. Experiments were performed in triplicate and repeated at least three times. Means and standard deviations of one representative experiment are shown.

[0393] FIG. 253. X-Z and X-Y panels and three dimensional views of 72 h bio-films formed by SF370 wild type (A), Δspy0128 (B), Δspy128/pAM::128 (C), Δspy0129 (D), Δsp\tilde{y}012\tilde{9}/pAM::129 (E). Bacteria were grown in C-medium for 72 hours at room temperature on polylysine-coated coverslips placed at the bottom of 50 ml tubes. Medium was changed every 24 hours. Coverslips were then recovered, fixed and stained with anti-GAS (blue) and anti-spy128 (red) sera, and with FITC conjugated-ConA (green). Thickness of bio-films was also measured in different points of each field, and the average of at least 6 measures with standard deviations are reported in the table.

[0394] FIG. 254. Graphs showing that passive transfer of antisera to S. pneumoniae TIGR4 native pilus protects against S. pneumoniae TIGR4 challenge.

[0395] FIG. 255. Correlation between Pilus Islands distribution and GBS capsular serotype. The different colors represent the pilus islands combination found in the clinical isolates, as shown in the legend. The number of isolates containing the different types of pilus islands is indicated inside each column.

[0396] FIG. 256. Schematic representation of sequence variability of pilus-coding genes among GBS clinical isolates. (A), (B) and (C) indicate gene conservation in isolates containing PI-1, PI-2a and PI-2b, respectively. The total number of strains containing the same PI allele and their serotype distribution are boxed at the right side of each allele. Grey arrows represent the sortases genes present in each island. Sequences with 100% identity are shown in the same color, while variants showing less than 90% sequence identity are indicated in different colors. Single mutations are represented with vertical bars and the number above each bar indicates the position/substitution of the mutated residue. (D) Phylogenetic trees inferred from the protein alignments by the neighbour-joining-distance-based method of variants of BP-2a and of AP1-2a. Numbers at the nodes indicate bootstrap values.

[0397] FIG. 257. Correlation between the presence of pilus islands (PCR positive, red columns) and surface exposure of pili structural components measured by flow cytometry as the difference in fluorescence between cells stained with immune sera versus pre-immune sera. Numbers inside each column represent the number of strains that belong to each group, whereas the numbers shown at the top of columns indicate the average values of fold increase in fluorescence and the corresponding standard deviation. Blue color columns represent the number of strains showing a greater than 2-fold increase in fluorescence. Yellow columns indicate the number of strains showing a greater than 5-fold increase in fluorescence.

### DETAILED DESCRIPTION OF THE INVENTION

[0398] The practice of the present invention will employ, unless otherwise indicated, conventional methods of chemistry, biochemistry, molecular biology, immunology and pharmacology, within the skill of the art. Such techniques are explained fully in the literature. See, e.g., Remington's Pharmaceutical Sciences, Mack Publishing Company, Easton, Pa., 19th Edition (1995); Methods In Enzymology (S. Colowick and N. Kaplan, eds., Academic Press, Inc.); and Handbook of Experimental Immunology, Vols. I-IV (D. M. Weir and C. C. Blackwell, eds., 1986, Blackwell Scientific Publications); Sambrook, et al., Molecular Cloning: A Laboratory Manual (2nd Edition, 1989); Handbook of Surface and Colloidal Chemistry (Birdi, K. S. ed., CRC Press, 1997); Short Protocols in Molecular Biology, 4th ed. (Ausubel et al. eds., 1999, John Wiley & Sons); Molecular Biology Techniques: An Intensive Laboratory Course, (Ream et al., eds., 1998, Academic Press); PCR (Introduction to Biotechniques Series), 2nd ed. (Newton & Graham eds., 1997, Springer Verlag); Peters and Dalrymple, Fields Virology (2d ed), Fields et al. (eds.), B. N. Raven Press, New York, N.Y.

[0399] All publications, patents and patent applications cited herein, are hereby incorporated by reference in their entireties.

[0400] As used herein, an “Adhesin Island” or “AI” refers to a series of open reading frames within a bacterial genome, such as the genome for Group A or Group B Streptococcus or other gram positive bacteria, that encodes for a collection of surface proteins and sortases. An Adhesin Island may encode for amino acid sequences comprising at least one surface protein. The Adhesin Island may encode at least one surface protein. Alternatively, an Adhesin Island may encode for at least two surface proteins and at least one sortase. Preferably, an Adhesin Island encodes for at least three surface proteins and at least two sortases. One or more of the surface proteins may include an LPXTG motif (e.g., SEQ ID NO:122) or other sortase substrate motif. One or more AI surface proteins may participate in the formation of a pilus structure on the surface of the gram positive bacteria.

[0401] Adhesin Islands of the invention preferably include a divergently transcribed transcriptional regulator (i.e., the transcriptional regulator is located near or adjacent to the AI protein open reading frames, but it transcribed in the opposite direction). The transcriptional regulator may regulate the expression of the AI operon.

[0402] GBS Adhesin Island 1

[0403] As discussed above, Applicants have identified a new adhesin island, “Adhesin Island 1,” “AI-1,” or “GBS AI-1,” within the genomes of several Group B Streptococcus serotypes and isolates. AI-1 comprises a series of approximately five open reading frames encoding for a collection of amino acid sequences comprising surface proteins and sortases (“AI-1 proteins”). Specifically, AI-1 includes open reading frames encoding for two or more (i.e., 2, 3, 4 or 5) of GBS 80, GBS 104, GBS 52, SAG0647 and SAG0648. One or more of the AI-1 open reading frame polynucleotide sequences may be replaced by a polynucleotide sequence coding for a fragment of the replaced ORF. Alternatively, one or more of the AI-1 open reading frames may be replaced by a sequence having sequence homology to the replaced ORF.

[0404] A schematic of AI-1 is presented in FIG. 1. AI-1 typically resides on an approximately 16.1 kb transposon-like element frequently inserted into the open reading frame for trmA. One or more of the AI-1 surface protein sequences typically include an LPXTG motif (e.g., SEQ ID NO:122) motif or other sortase substrate motif. The AI surface proteins of the invention may affect the ability of the GBS bacteria to adhere to and invade epithelial cells. AI surface proteins may also affect the ability of GBS to translocate through an epithelial cell layer. Preferably, one or more AI surface proteins are capable of binding to or otherwise associating with an epithelial cell surface. AI surface proteins may also be able to bind to or associate with fibrinogen, fibronectin, or collagen.

[0405] The AI-1 sortase proteins are predicted to be involved in the secretion and anchoring of the LPXTG containing surface proteins. AI-1 may encode for at least one surface protein. Alternatively, AI-1 may encode for at least two surface exposed proteins and at least one sortase. Preferably, AI-1 encodes for at least three surface exposed proteins and at least two sortases. The AI-1 protein preferably includes GBS 80 or a fragment thereof or a sequence having sequence identity thereto.

[0406] As used herein, an LPXTG motif represents an amino acid sequence comprising at least five amino acid residues. Preferably, the motif includes a leucine (L) in the first amino acid position, a proline (P) in the second amino acid position, a threonine (T) in the fourth amino acid position and a glycine (G) in the fifth amino acid position. The third position, represented by X, may be occupied by any amino acid residue. Preferably, the X is occupied by lysine (K), Glutamate (E), Asparagine (N), Glutamine (Q) or Alanine (A). Preferably, the X position is occupied by lysine (K). In some embodiments, one of the assigned LPXTG amino acid positions is replaced with another amino acid. Preferably, such replacements comprise conservative amino acid replacements, meaning that the replaced amino acid residue has similar physiological properties to the removed amino acid residue. Genetically encoded amino acids may be divided into four families based on physiological properties: (1) acidic (aspartate and glutamate), (2) basic (lysine, arginine, histidine), (3) non-polar (alanine, valine, leucine, isoleucine, proline, phenylalanine, methionine, tryptophan) and (4) uncharged polar (glycine, asparagines, glutamine, cysteine, serine, threonine, and tyrosine). Phenylalanine, tryptophan and tyrosine are sometimes classified jointly as aromatic amino acids. For example, it is reasonably predictable that an isolated replacement of a leucine with an isoleucine or valine, an aspartate with a glutamate, a threonine with a serine, or a similar conservative replacement of an amino acid with a structurally related amino acid will not have a major effect on the biological activity.

[0407] The first amino acid position of the LPXTG motif may be replaced with another amino acid residue. Preferably, the first amino acid residue (leucine) is replaced with an alanine (A), valine (V), isoleucine (I), proline (P), phenylalanine (F), methionine (M), glutamic acid (E), glutamine (Q), or tryptophan (Y) residue. In one preferred embodiment, the first amino acid residue is replaced with an isoleucine (I).

[0408] The second amino acid residue of the LPXTG motif may be replaced with another amino acid residue. Preferably, the second amino acid residue praline (P) is replaced with a valine (V) residue.

[0409] The fourth amino acid residue of the LPXTG motif may be replaced with another amino acid residue. Preferably, the fourth amino acid residue (threonine) is replaced with a serine (S) or an alanine (A).

[0410] In general, an LPXTG motif may be represented by the amino acid sequence XXXXG, in which X at amino acid position 1 is an L, a V, an E, an I, an F, or a Q; X at amino acid position 2 is a P if X at amino acid position 1 is an L, an I, or an F; X at amino acid position 2 is a V if X at amino acid position 1 is a E or a Q; X at amino acid position 2 is a V or a P if X at amino acid position 1 is a V; X at amino acid position 3 is any amino acid residue; X at amino acid position 4 is a T if X at amino acid position 1 is a V, E, I, F, or Q; and X at amino acid position 4 is a T, S, or A if X at amino acid position 1 is an L.

[0411] Generally, the LPXTG motif of a GBS AI protein may be represented by the amino acid sequence XPXTG, in which X at amino acid position 1 is L, I, or F, and X at amino acid position 3 is any amino acid residue. Specific examples of LPXTG motifs in GBS AI proteins may include LPXTG (SEQ ID NO:122) or IPXTG (SEQ ID NO:133).

[0412] As discussed further below, the threonine in the fourth amino acid position of the LPXTG motif may be involved in the formation of a bond between the LPXTG containing protein and a cell wall precursor. Accordingly, in preferred LPXTG motifs, the threonine in the fourth amino acid position is not replaced with another amino acid or, if the threonine is replaced, the replacement amino acid is preferably a conservative amino acid replacement, such as serine.

[0413] Instead of an LPXTG motif, the AI surface proteins of the invention may contain alternative sortase substrate motifs such as NPQTN (SEQ ID NO:142), NPKTN (SEQ ID NO:168), NPQTG (SEQ ID NO:169), NPKTG (SEQ ID NO:170), XPXTGG (SEQ ID NO:143), LPXTAX (SEQ ID NO:144), or LAXTGX (SEQ ID NO:145). (Similar conservative amino acid substitutions can also be made to these membrane motifs).

[0414] The AI surface proteins may be covalently attached to the bacterial cell wall by membrane-associated transpeptidases, such as an AI sortase. The sortase may function to cleave the surface protein, preferably between the threonine and glycine residues of an LPXTG motif. The sortase may then assist in the formation of an amide link between the threonine carboxyl group and a cell wall precursor such as lipid II. The precursor can then be incorporated into the peptidoglycan via the transglycoslylation and transpeptidation reactions of bacterial wall synthesis. See Comfort et al., Infection & Immunity (2004) 72(5): 2710-2722.

[0415] The AI surface proteins may be polymerized into pili by sortase-catalysed transpeptidation. (See FIG. 44.) Cleavage of AI surface proteins by sortase between the threonine and glycine residues of an LPXTG motif yields a thioester-linked acyl intermediate of sortase. Many AI surface proteins include a pilin motif amino acid sequence which interacts with the sortase and LPXTG amino acid sequence. The first lysine residue in a pilin motif can serve as an amino group acceptor of the cleaved LPXTG motif and thereby provide a covalent linkage between AI subunits to form pili. For example, the pilin motif can make a nucleophilic attack on the acyl enzyme providing a covalent linkage between AI subunits to form pili and regenerate the sortase enzyme. Examples of pilin motifs may include ((YPKN(X₁₀)K; SEQ ID NO:146), (YPKN(X₉)K; SEQ ID NO:147), (YPK(X₇)K; SEQ ID NO:148), (YPK(X₁₁)K; SEQ ID NO:149), or (PKN(X₉)K; SEQ ID NO:150)). Preferably, the AI surface proteins of the invention include a pilin motif amino acid sequence.

[0416] Typically, AI surface proteins of the invention will contain an N-terminal leader or secretion signal to facilitate translocation of the surface protein across the bacterial membrane.

[0417] Group B Streptococci are known to colonize the urinary tract, the lower gastrointestinal tract and the upper respiratory tract in humans. Electron micrograph images of GBS infection of a cervical epithelial cell line (ME180) are presented in FIG. 25. As shown in these images, the bacteria closely associate with tight junctions between the cells and appear to cross the monolayer by a paracellular route. Similar paracellular invasion of ME180 cells is also shown in the contrast images in FIG. 26. The AI surface proteins of the invention may effect the ability of the GBS bacteria to adhere to and invade epithelial cells. AI surface proteins may also affect the ability of GBS to translocate through an epithelial cell layer. Preferably, one or more AI surface proteins are capable of binding to or otherwise associating with an epithelial cell surface.

[0418] Applicants have discovered that AI-1 surface protein GBS 104 can bind epithelial cells such as ME180 human cervical cells, A549 human lung cells and Caco2 human intestinal cells (See FIGS. 29 and 210). Further, deletion of the GBS 104 sequence in a GBS strain reduces the capacity of GBS to adhere to ME180 cervical epithelial cells. (See FIGS. 30 and 211). Deletion of GBS 104 also reduces the capacity of GBS to invade J774 macrophage-like cells. (See FIGS. 32 and 205). Deletion of GBS 104 also causes GBS to translocate through epithelial monolayers less efficiently. See FIG. 206. GBS 104 protein therefore appears to bind to ME180 epithelial cells and to have a role in adhesion to epithelial cells and macrophage cell lines.

[0419] Similar to the GBS bacteria that are deletion mutants for GBS 104, GBS 80 knockout mutant strains also partially lose the ability to translocate through an epithelial monolayer. See FIG. 207. Deletion of either GBS 80 or GBS 104 in COH1 cells diminishes adherence to HUVEC endothelial cells. See FIG. 208. Deletion of GBS 80 or GBS 104 in COH1 does not, however, affect growth of COH1 either with ME180 cells or in incubation medium (IM). See FIG. 209. Both GBS 80 and GBS 104, therefore, appear to be involved in translocation of GBS through epithelial cells.

[0420] GBS 80 does not appear to bind to epithelial cells. Incubation of epithelial cells in the presence of GBS 80 protein followed by FACS analysis using an anti-GBS 80 polyclonal antibody did not detect GBS 80 binding to the epithelial cells. See FIG. 202. Furthermore, deletion of GBS 80 protein does not affect the ability of GBS to adhere and invade ME180 cervical epithelial cells. See FIG. 203

[0421] Preferably, one or more of the surface proteins may bind to one or more extracellular matrix (ECM) binding proteins, such as fibrinogen, fibronectin, or collagen. As shown in FIGS. 5 and 204, and Example 1, GBS 80, one of the AI-1 surface proteins, can bind to the extracellular matrix binding proteins fibronectin and fibrinogen. While GBS 80 protein apparently does not bind to certain epithelial cells or affect the capacity of a GBS bacteria to adhere to or invade cervical epithelial cells (See FIGS. 27 and 28), removal of GBS 80 from a wild type strain decreases the ability of that strain to translocate through an epithelial cell layer (see FIG. 31).

[0422] GBS 80 may also be involved in formation of biofilms. COH1 bacteria overexpressing GBS 80 protein have an impaired ability to translocate through an epithelial monolayer. See FIG. 212. These COH1 bacteria overexpressing GBS 80 form microcolonies on epithelial cells. See FIGS. 213 and 214. These microcolonies may be the initiation of biofilm development.

[0423] AI Surface proteins may also demonstrate functional homology to previously identified adhesion proteins or extracellular matrix (ECM) binding proteins. For example, GBS 80, a surface protein in AI-1, exhibits some functional homology to FimA, a major fimbrial subunit of a Gram positive bacteria A. naeslundii. FimA is thought to be involved in binding salivary proteins and may be a component in a fimbrae on the surface of A. naeslundii. See Yeung et al. (1997) Infection & Immunity 65:2629-2639; Yeunge et al (1998) J. Bacteriol 66:1482-1491; Yeung et al. (1988) J. Bacteriol 170:3803-3809; and Li et al. (2001) Infection & Immunity 69:7224-7233.

[0424] A similar functional homology has also been identified between GBS 80 and proteins involved in pili formation in the Gram positive bacteria Corynebacterium diphtheriae (SpaA, SpaD, and SpaH). See, Ton-That et al. (2003) Molecular Microbiology 50(4):1429-1438 and Ton-That et al. (2004) Molecular Microbiology 53(1):251-261. The C. diphtheriae proteins all included a pilin motif of WxxxVxVYPK (SEQ ID NO:151; where x indicates a varying amino acid residue). The lysine (K) residue is particularly conserved in the C. diphtheriae pilus proteins and is thought to be involved in sortase catalyzed oligomerization of the subunits involved in the C. diphtheriae pilus structure. (The C. diphtheriae pilin subunit SpaA is thought to occur by sortase-catalyzed amide bond cross-linking of adjacent pilin subunits. As the thioester-linked acyl intermediate of sortase requires nucleophilic attack for release, the conserved lysine within the SpaA pilin motif might function as an amino group acceptor of cleaved sorting signals, thereby providing for covalent linkages of the C. diphtheria pilin subunits. See FIG. 6(d) of Ton-That et al., Molecular Microbiology (2003) 50(4):1429-1438.)

[0425] In addition, an “E box” comprising a conserved glutamic acid residue has also been identified in the C. diphtheria pilin associated proteins as important in C. diphtheria pilin assembly. The E box motif generally comprises YxLxETxAPxGY (SEQ ID NO:152; where x indicates a varying amino acid residue). In particular, the conserved glutamic acid residue within the E box is thought necessary for C. diphtheria pilus formation.

[0426] Preferably, the AI-1 polypeptides of the immunogenic compositions comprise an E box motif. Some examples of E box motifs in the AI-1 polypeptides may include the amino acid sequences YxLxExxxxxGY (SEQ ID NO:153), YxLxExxxPxGY (SEQ ID NO:154), or YxLxETxAPxGY (SEQ ID NO:152). Specifically, the E box motif of the polypeptides may comprise the amino acid sequences YKLKETKAPEGY (SEQ ID NO:155), YVLKEIETQSGY (SEQ ID NO:156), or YKLYEISSPDGY (SEQ ID NO:157).

[0427] As discussed in more detail below, a pilin motif containing a conserved lysine residue and an E box motif containing a conserved glutamic acid residue have both been identified in GBS 80.

[0428] While previous publications have speculated that pilus-like structures might be formed on the surface of streptococci, (see, e.g., Ton-That et al., Molecular Microbiology (2003) 50(4): 1429-1438), these structures have not been previously visible in negative stain (non-specific) electron micrographs, throwing such speculations into doubt. For example, FIG. 34 presents electron micrographs of GBS serotype III, strain isolate COH1 with a plasmid insert to facilitate the overexpression of GBS 80. This EM photo was produced with a standard negative stain-no pilus structures are distinguishable. In addition, the use of such AI surface proteins in immunogenic compositions for the treatment or prevention of infection against a Gram positive bacteria has not been previously described.

[0429] Surprisingly, Applicants have now identified the presence of GBS 80 in surface exposed pilus formations visible in electron micrographs. These structures are only visible when the electron micrographs are specifically stained against an AI surface protein such as GBS 80. Examples of these electron micrographs are shown in FIGS. 11, 16 and 17, which reveal the presence of pilus structures in wild type COH1 Streptococcus agalactiae. Other examples of these electron micrographs are shown in FIG. 49, which reveals that GBS 80 is associated with pili in a wild type clinical isolate of S. agalactiae, JM9030013. (See FIG. 49.)

[0430] Applicants have also constructed mutant GBS strains containing a plasmid comprising the GBS 80 sequence resulting in the overexpression of GBS 80 within this mutant. The electron micrographs of FIGS. 13-15 are also stained against GBS 80 and reveal long, oligomeric structures containing GBS 80 which appear to cover portions of the surface of the bacteria and stretch far out into the supernatant.

[0431] In some instances, the formation of pili structures on GBS appears to be correlated to surface expression of GBS 80. FIG. 61 provides FAC analysis of GBS 80 surface levels on bacterial strains COH1 and JM9130013 using an anti-GBS 80 antisera Immunogold electron microscopy of the COH1 and JM9130013 bacteria using anti-GBS 80 antisera demonstrates that JM9130013 bacteria, which have higher values for GBS 80 surface expression, also form longer pili structures.

[0432] The surface exposure of GBS 80 on GBS is generally not capsule-dependent. FIG. 62 provides FACS analysis of capsulated and uncapsulated GBS analyzed with anti-GBS 80 and anti-GBS 322 antibodies. Surface exposure of GBS 80, unlike GBS 322, is not capsule dependent.

[0433] An Adhesin Island surface protein, such as GBS 80 appears to be required for pili formation, as well as an Adhesin Island sortase. Pili are formed in Cohl bacterial clones that overexpress GBS 80, but lack GBS 104, or one of the AI-1 sortases sag0647 or sag0648. However, pili are not formed in Cohl bacterial clones that overexpress GBS 80 and lack both sag0647 and sag0648. Thus, for example, it appears that at least GBS 80 and a sortase, sag0647 or sag0648, may be necessary for pili formation. (See FIG. 48.) Overexpression of GBS 80 in GBS strain 515, which lacks an AI-1, also assembles GBS 80 into pili. GBS strain 515 contains an AI-2, and thus AI-2 sortases. The AI-2 sortases in GBS strain 515 apparently polymerize GBS 80 into pili. (See FIG. 42.) Overexpression of GBS 80 in GBS strain 515 cell knocked out for GBS 67 expression also apparently polymerizes GBS 80 into pili. (See FIG. 72.)

[0434] While GBS 80 appears to be required for GBS AI-1 pili formation, GBS 104 and sortase SAG0648 appears to be important for efficient AI-1 pili assembly. For example, high-molecular structures are not assembled in isogenic COH1 strains which lack expression of GBS 80 due to gene disruption and are less efficiently assembled in isogenic COH1 strains which lack the expression of GBS 104 (see FIG. 41). This GBS strain comprises high molecular weight pili structures composed of covalently linked GBS 80 and GBS 104 subunits. In addition, deleting SAG0648 in COH1 bacteria interferes with assembly of some of the high molecular weight pili structures. Thus, indicating that SAG0648 plays a role in assembly of these pilin species. (See FIG. 41).

[0435] EM photos confirm the involvement of AI surface protein GBS 104 within the hyperoligomeric structures of a GBS strain adapted for increased GBS 80 expression. (See FIGS. 34-41 and Example 6). In a wild type serotype VIII GBS strain, strain JM9030013, IEM identifies GBS 104 as forming clusters on the bacterial surface. (See FIG. 50.)

[0436] GBS 52 also appears to be a component of the GBS pili Immunoblots using an anti-GBS 80 antisera on total cell extracts of Cohl and a GBS 52 null mutant Cohl reveal a shift in detected proteins in the Cohl wild type strain relative to the GBS 52 null mutant Cohl strain. The shifted proteins were also detected in the wild type Cohl bacteria with an anti-GBS 52 antisera, indicating that the GBS 52 may be present in the pilus. (See FIG. 45.)

[0437] In one embodiment, the invention includes a composition comprising oligomeric, pilus-like structures comprising an AI surface protein such as GBS 80. The oligomeric, pilus-like structure may comprise numerous units of AI surface protein. Preferably, the oligomeric, pilus-like structures comprise two or more AI surface proteins. Still more preferably, the oligomeric, pilus-like structure comprises a hyper-oligomeric pilus-like structure comprising at least two (e.g., 2, 3, 4, 5, 6, 7, 8, 9, 10, 11, 12, 13, 14, 15, 20, 25, 30, 35, 40, 45, 50, 60, 70, 80, 90, 100, 120, 140, 150, 200 or more) oligomeric subunits, wherein each subunit comprises an AI surface protein or a fragment thereof. The oligomeric subunits may be covalently associated via a conserved lysine within a pilin motif. The oligomeric subunits may be covalently associated via an LPXTG motif, preferably, via the threonine amino acid residue.

[0438] AI surface proteins or fragments thereof to be incorporated into the oligomeric, pilus-like structures of the invention will preferably include one or both of a pilin motif comprising a conserved lysine residue and an E box motif comprising a conserved glutamic acid residue.

[0439] More than one AI surface protein may be present in the oligomeric, pilus-like structures of the invention. For example, GBS 80 and GBS 104 may be incorporated into an oligomeric structure. Alternatively, GBS 80 and GBS 52 may be incorporated into an oligomeric structure, or GBS 80, GBS 104 and GBS 52 may be incorporated into an oligomeric structure.

[0440] In another embodiment, the invention includes compositions comprising two or more AI surface proteins. The composition may include surface proteins from the same adhesin island. For example, the composition may include two or more GBS AI-1 surface proteins, such as GBS 80, GBS 104 and GBS 52. The surface proteins may be isolated from Gram positive bacteria or they may be produced recombinantly.

[0441] The oligomeric, pilus like structures may be used alone or in the combinations of the invention. In one embodiment, the invention comprises a GBS Adhesin Island protein in oligomeric form, preferably in a hyperoligomeric form. In one embodiment, the invention comprises a composition comprising one or more GBS Adhesin Island 1 (“AI-1”) proteins and one or more GBS Adhesin Island 2 (“AI-2”) proteins, wherein one or more of the Adhesin Island proteins is in the form of an oligomer, preferably in a hyperoligomeric form.

[0442] The oligomeric, pilus-like structures of the invention may be combined with one or more additional GBS proteins. In one embodiment, the oligomeric, pilus-like structures comprise one or more AI surface proteins in combination with a second GBS protein. The second GBS protein may be a known GBS antigen, such as GBS 322 (commonly referred to as “sip”) or GBS 276. Nucleotide and amino acid sequences of GBS 322 sequenced from serotype V isolated strain 2603 V/R are set forth in WO 02/35771 as SEQ ID 8539 and SEQ ID 8540 and in the present specification as SEQ ID NOS: 38 and 39. A particularly preferred GBS 322 polypeptide lacks the N-terminal signal peptide, amino acid residues 1-24. An example of a preferred GBS 322 polypeptide is a 407 amino acid fragment and is shown in SEQ ID NO:40. Examples of preferred GBS 322 polypeptides are further described in WO 2005/028618.

[0443] Additional GBS proteins which may be combined with the GBS AI surface proteins of the invention are also described in WO 2005/028618. These GBS proteins include GBS 91, GBS 184, GBS 305, GBS 330, GBS 338, GBS 361, GBS 404, GBS 690, and GBS 691.

[0444] Additional GBS proteins which may be combined with the GBS AI surface proteins of the invention are described in WO 02/34771. These GBS proteins include but are not limited to GBS293, GBS65, GBS97, GBS84, GBS147, and GBS325.

[0445] GBS polysaccharides which may be combined with the GBS AI surface proteins of the invention are described in WO 2004/041157. For example, the GBS AI surface proteins of the invention may be combined with a GBS polysaccharides selected from the group consisting of serotype Ia, Ib, Ia/c, II, III, IV, V, VI, VII and VIII.

[0446] The oligomeric, pilus-like structures may be isolated or purified from bacterial cultures in which the bacteria express an AI surface protein. The invention therefore includes a method for manufacturing an oligomeric AI surface antigen comprising culturing a GBS bacterium that expresses the oligomeric AI protein and isolating the expressed oligomeric AI protein from the GBS bacteria. The AI protein may be collected from secretions into the supernatant or it may be purified from the bacterial surface. The method may further comprise purification of the expressed AI protein. Preferably, the AI protein is in a hyperoligomeric form. Macromolecular structures associated with oligomeric pili are observed in the supernatant of cultured GBS strain Cohl. (See FIG. 46.) These pili are found in the supernatant at all growth phases of the cultured Cohl bacteria. (See FIG. 47.)

[0447] The oligomeric, pilus-like structures may be isolated or purified from bacterial cultures overexpressing an AI surface protein. The invention therefore includes a method for manufacturing an oligomeric Adhesin Island surface antigen comprising culturing a GBS bacterium adapted for increased AI protein expression and isolation of the expressed oligomeric Adhesin Island protein from the GBS bacteria. The AI protein may be collected from secretions into the supernatant or it may be purified from the bacterial surface. The method may further comprise purification of the expressed Adhesin Island protein. Preferably, the Adhesin Island protein is in a hyperoligomeric form.

[0448] The GBS bacteria are preferably adapted to increase AI protein expression by at least two (e.g., 2, 3, 4, 5, 8, 10, 15, 20, 25, 30, 35, 40, 45, 50, 60, 70, 80, 90, 100, 125, 150 or 200) times wild type expression levels.

[0449] GBS bacteria may be adapted to increase AI protein expression by any means known in the art, including methods of increasing gene dosage and methods of gene upregulation. Such means include, for example, transformation of the GBS bacteria with a plasmid encoding the AI protein. The plasmid may include a strong promoter or it may include multiple copies of the sequence encoding the AI protein. Optionally, the sequence encoding the AI protein within the GBS bacterial genome may be deleted. Alternatively, or in addition, the promoter regulating the GBS Adhesin Island may be modified to increase expression.

[0450] GBS bacteria harbouring a GBS AI-1 may also be adapted to increase AI protein expression by altering the number adenosine nucleotides present at two sites in the intergenic region between AraC and GBS 80. See FIG. 197A, which is a schematic showing the organization of GBS AI-1 and FIG. 197B, which provides the sequence of the intergenic region between AraC and GBS 80 in the AI. The adenosine tracts which applicants have identified as influencing GBS 80 surface expression are at nucleotide positions 187 and 233 of the sequence shown in FIG. 197B (SEQ ID NO:273). Applicants determined the influence of these adenosine tracts on GBS 80 surface expression in strains of GBS bacteria harboring four adenosines at position 187 and six adenosines at position 233, five adenosines at position 187 and six adenosines position 233, and five adenosines at position 187 and seven adenosines at position 233. FACS analysis of these strains using anti GBS 80 antiserum determined that an intergenic region with five adenosines at position 187 and six adenosines at position 233 had higher expression levels of GBS 80 on their surface than other stains. See FIG. 197C for results obtained from the FACS analysis. Therefore, manipulating the number of adenosines present at positions 187 and 233 of the AraC and GBS 80 intergenic region may further be used to adapt GBS to increase AI protein expression.

[0451] The invention further includes GBS bacteria which have been adapted to produce increased levels of AI surface protein. In particular, the invention includes GBS bacteria which have been adapted to produce oligomeric or hyperoligomeric AI surface protein, such as GBS 80. In one embodiment, the Gram positive bacteria of the invention are inactivated or attenuated to permit in vivo delivery of the whole bacteria, with the AI surface protein exposed on its surface.

[0452] The invention further includes GBS bacteria which have been adapted to have increased levels of expressed AI protein incorporated in pili on their surface. The GBS bacteria may be adapted to have increased exposure of oligomeric or hyperoligomeric AI proteins on its surface by increasing expression levels of a signal peptidase polypeptide. Increased levels of a local signal peptidase expression in Gram positive bacteria (such us LepA in GAS) are expected to result in increased exposure of pili proteins on the surface of Gram positive bacteria. Increased expression of a leader peptidase in GBS may be achieved by any means known in the art, such as increasing gene dosage and methods of gene upregulation. The GBS bacteria adapted to have increased levels of leader peptidase may additionally be adapted to express increased levels of at least one pili protein.

[0453] Alternatively, the AI proteins of the invention may be expressed on the surface of a non-pathogenic Gram positive bacteria, such as Streptococcus gordonii (See, e.g., Byrd et al., “Biological consequences of antigen and cytokine co-expression by recombinant Streptococcus gordonii vaccine vectors, ” Vaccine (2002) 20:2197-2205) or Lactococcus lactis (See, e.g., Mannam et al., “Mucosal Vaccine Made from Live, Recombinant Lactococcus lactis Protects Mice against Pharyngeal Infection with Streptococcus pyogenes” Infection and Immunity (2004) 72(6):3444-3450). As used herein, non-pathogenic Gram positive bacteria refer to Gram positive bacteria which are compatible with a human host subject and are not associated with human pathogenesis. Preferably, the non-pathogenic bacteria are modified to express the AI surface protein in oligomeric, or hyper-oligomeric form. Sequences encoding for an AI surface protein and, optionally, an AI sortase, may be integrated into the non-pathogenic Gram positive bacterial genome or inserted into a plasmid. The non-pathogenic Gram positive bacteria may be inactivated or attenuated to facilitate in vivo delivery of the whole bacteria, with the AI surface protein exposed on its surface. Alternatively, the AI surface protein may be isolated or purified from a bacterial culture of the non-pathogenic Gram positive bacteria. For example, the AI surface protein may be isolated from cell extracts or culture supernatants. Alternatively, the AI surface protein may be isolated or purified from the surface of the non-pathogenic Gram positive bacteria.

[0454] The non-pathogenic Gram positive bacteria may be used to express any of the Gram positive bacterial Adhesin Island proteins described herein, including proteins from a GBS Adhesin Island, a GAS Adhesin Island, or a S pneumo Adhesin Island. The non-pathogenic Gram positive bacteria are transformed to express an Adhesin Island surface protein. Preferably, the non-pathogenic Gram positive bacteria also express at least one Adhesin Island sortase. The AI transformed non-pathogenic Gram positive bacteria of the invention may be used to prevent or treat infection with a pathogenic Gram positive bacteria, such as GBS, GAS or Streptococcus pneumoniae. The non-pathogenic Gram positive bacteria may express the Gram positive bacterial Adhesin Island proteins in oligomeric forms that further comprise adhesin island proteins encoded within the genome of the non-pathogenic Gram positive bacteria.

[0455] Applicants modified L. lactis to demonstrate that it can express GBS AI polypeptides. L. lactis was transformed with a construct encoding GBS 80 under its own promoter and terminator sequences. The transformed L. lactis appeared to express GBS 80 as shown by Western blot analysis using anti-GBS 80 antiserum. See lanes 6 and 7 of the Western Blots provided in FIGS. 133A and 133B (133A and 133B are two different exposures of the same Western blot). See also Example 13.

[0456] Applicants also transformed L. lactis with a construct encoding GBS AI-1 polypeptides GBS 80, GBS 52, SAG0647, SAG0648, and GBS 104 under the GBS 80 promoter and terminator sequences. These L. lactis expressed high molecular weight structures that were immunoreactive with anti-GBS 80 in immunoblots. See FIG. 134, lane 2, which shows detection of a GBS 80 monomer and higher molecular weight polymers in total transformed L. lactis extracts. Thus, it appeared that L. lactis is capable of expressing GBS 80 in oligomeric form. The high molecular weight polymers were not only detected in L. lactis extracts, but also in the culture supernatants. See FIG. 135 at lane 4. See also Example 14. Thus, the GBS AI polypeptides in oligomeric form can be isolated and purified from either L. lactis cell extracts or culture supernatants. These oligomeric forms can, for instance, be isolated from cell extracts or culture supernatants by release by sonication. See FIG. 136A and B. See also FIG. 171, which shows purification of GBS pili from whole extracts of L. lactis expressing the GBS AI-1 following sonication and gel filtration on a Sephacryl HR 400 column.

[0457] Furthermore, the L. lactis transformed with the construct encoding GBS AI-1 polypeptides GBS 80, GBS 52, SAG0647, SAG0648, and GBS 104 under the GBS 80 promoter and terminator sequences expressed the GBS AI-1 polypeptides on its surface. FACS analysis of these transformed L. lactis detected cell surface expression of both GBS 80 and GBS 104. The surface expression levels of GBS 80 and GBS 104 on the transformed L. lactis were similar to the surface expression levels of GBS 80 and GBS 104 on GBS strains COH1 and JM9130013, which naturally express GBS AI-1. See FIG. 169 for FACS analysis data for L. lactis transformed with GBS AI-1 and wildtype JM9130013 bacteria using anti-GBS 80 and GBS 104 antisera. Table 40 provides the results of FACS analysis of transformed L. lactis, COH1, and JM9130013 bacteria using anti-GBS 80 and anti-GBS 104 antisera. The numbers provided represent the mean fluorescence value difference calculated for immune versus pre-immune sera obtained for each bacterial strain.

TABLE 40
FACS analysis of L. lactis and GBS
bacteria strains expressing GBS AI-1

| | Anti-GBS 80 | Anti-GBS 104 |
|---|---|---|
| | antiserum | antiserum |
| GBS AI-1 transformed L. lactis | 298 | 251 |
| GBS COH1 | 305 | 305 |
| GBS JM9130013 | 461 | 355 |

Immunogold-electronmicroscopy performed with anti-GBS 80 primary antibodies detected the presence of pilus structures on the surface of the L. lactis bacteria expressing GBS AI-1, confirming the results of the FACS analysis. See FIG. 168B and C. Interestingly, this expression of GBS pili on the surface of the L. lactis induced L. lactis aggregation. See FIG. 170. Thus, GBS AI polypeptides may also be isolated and purified from the surface of L. lactis. The ability of L. lactis to express GBS AI polypeptides on its surface also demonstrates that it may be useful as a host to deliver GBS AI antigens.

[0458] In fact, immunization of mice with L. lactis transformed with GBS AI-1 was protective in a subsequent challenge with GBS. Female mice were immunized with L. lactis transformed with GBS AI-1. The immunized female mice were bred and their pups were challenged with a dose of GBS sufficient to kill 90% of non-immunized pups. Detailed protocols for intranasal and subcutaneous immunization of mice with transformed L. lactis can be found in Examples 18 and 19, respectively. Table 43 provides data showing that immunization of the female mice with L. lactis expressing GBS AI-1 (LL-AI 1) greatly increased survival rate of challenged pups relative to both a negative PBS control (PBS) and a negative L. lactis control (LL 10 E9, which is wild type L. lactis not transformed to express GBS AI-1).

TABLE 43
Protection of Mice Immunized with L. lactis expressing GBS AI-1

| | | | | Survival | |
|---|---|---|---|---|---|
| Immunization | | Alive/ | Survival | % | |
| Route | Antigen | Treated | % | Range | p value |
| Intraperitoneum | Recombinant | 16/18 | 89 | 80-100 | <0.001 |
| | GBS 80 | | | | |
| Subcutaneous | LL-AI 1 10 E9 | 40/49 | 82 | 70-90 | <0.001 |
| | LL-AI 1 10 | 50/60 | 83 | 60-100 | <0.001 |
| | E10 | | | | |
| | PBS | 4/30 | 13 | 0-30 | |
| | LL 10 E9 | 3/57 | 5 | 0-20 | |
| Intranasal | LL-AI 1 10 E9 | 22/60 | 37 | 0-100 | 0.02 |
| | LL-AI 1 10 | 31/49 | 63 | 30-90 | <0.001 |
| | E10 | | | | |
| | LL 10 E9 | 2/27 | 7 | 0-20 | |

[0459] Table 51 provides further evidence that immunization of mice with L. lactis transformed with GBS AI-1 is protective against GBS.

TABLE 51
Further Protection of Mice Immunized with
L. lactis expressing GBS AI-1

| | Immunization | Alive/ | Survival % |
|---|---|---|---|
| Antigen | route | Treated | (p < 0.0000001) |
| recombinant GBS 80 | IP | 48/50 | 92 |
| Recombinant GBS 80 | SC | 21/30 | 70 |
| L. lactis + AI1 10⁶ cfu | SC | 6/66 | 9 |
| L. lactis + AI1 10⁷ cfu | SC | 47/70 | 73 |
| L. lactis + AI1 10⁸ cfu | SC | 116/153 | 76 |
| L. lactis + AI1 10⁹ cfu | SC | 98/118 | 83 |
| L. lactis + AI1 10¹⁰ cfu | SC | 107/129 | 83 |
| L. lactis 10¹⁰ cfu | SC | 4/83 | 5 |
| PBS | SC | 6/110 | 5 |
| L. lactis + AI1 10¹⁰ cfu | IN | 51/97 | 52 |
| L. lactis 10¹¹ cfu | IN | 1/40 | 7 |
| PBS | IN | 0/37 | 0 |

[0460] Protection of immunized mice with L. lactis expressing the GBS AI-1 is at least partly due to a newly raised antibody response. Table 46 provides anti-GBS 80 antibody titers detected in serum of the mice immunized with L. lactis expressing the GBS AI-1 as described above. Mice immunized with L. lactis expressing the GBS AI-1 have anti-GBS 80 antibody titres, which are not observed in mice immunized with L. lactis not transformed to express the GBS AI-1. Further, as expected from the survival data, mice subcutaneously immunized with L. lactis transformed to express the GBS AI-1 have significantly higher serum anti-GBS 80 antibody titers than mice intranasally immunized with L. lactis transformed to express the GBS AI-1.

TABLE 46
Antibody Responses against GBS 80 in Serum of Mice
Immunized with L. lactis Expressing GBS AI-1

| | Ab Titre Obtained Following | | |
|---|---|---|---|
| | Subcutaneous | Intranasal | Intraperitoneal |
| Antigen | Immunization | Immunization | Immunization |
| LL 10 E9 | 0 | 0 | |
| LL-AI 1 10 E9 | 14000 | 50 | |
| LL-AI 1 10 E10 | 25000 | 406 | |
| Recombinant GBS 80 | | | 120000 |

[0461] Anti-GBS 80 antibodies of the IgA isotype were specifically detected in various body fluids of the mice subcutaneously or intranasally immunized with L. lactis expressing the GBS AI-1.

TABLE 47
Anti-GBS 80 IgA Antibodies Detected in Mouse Tissues Following
Immunization with L. lactis Expressing GBS AI-1

| | Immunization | Anti-GBS 80 IgA Antibodies Detected in | | |
|---|---|---|---|---|
| Antigen | route | Serum | Vaginal Wash | Nasal Wash |
| LL 10 E9 | | 0 | 0 | 0 |
| LL-AI 1 | Subcutaneous | 0 | 25 | 20 |
| LL-AI 1 | Intranasal | 140 | 0 | 150 |
| GBS 80 | Intraperitoneal | 60 | 0 | |

[0462] Furthermore, opsonophagocytosis assays also demonstrated that at least some of the antiserum produced against the L. lactis expressing GBS AI 1 is opsonic for GBS. See FIG. 161.

[0463] To obtain protection of against GBS across a greater number of strains and serotypes, it is possible to transform L. lactis with a recombinant GBS AI encoding both GBS AI-1 and AI-2, i.e., a hybrid GBS AI. By way of example, a hybrid GBS AI may be a GBS AI-1 with a replacement of the GBS 104 gene with a GBS 67 gene. A schematic of such a hybrid GBS AI is depicted in FIG. 231A. A hybrid GBS AI may alternatively be a GBS AI-1 with a replacement of the GBS 52 gene with a GBS 59 gene. See the schematic at FIG. 231B. Alternatively, a hybrid GBS AI may be a GBS AI-1 with a substitution of a GBS 59 polypeptide for the GBS 52 gene and a substitution of the GBS 104 gene for genes encoding GBS 59 and the two GBS AI-2 sortases. Another example of a hybrid GBS AI is a GBS AI-1 with the substitution of a GBS 59 gene for the GBS 52 gene and a GBS 67 for the GBS 104 gene. See the schematic at FIG. 232. A further example of a hybrid GBS AI is a GBS AI-1 having a GBS 59 gene and genes encoding the GBS AI-2 sortases in place of the GBS 52 gene. Yet another example of a hybrid GBS AI is a GBS AI-1 with a substitution of either GBS 52 or GBS 104 with a fusion protein comprising GBS 322 and one of GBS 59, GBS 67, or GBS 150. Some of these hybrid GBS AIs may be prepared as briefly outlined in FIG. 234A-F.

[0464] Applicants have prepared a hybrid GBS AI having a GBS AI-1 sequence with a substitution of a GBS 67 coding sequence for the GBS 104 gene as depicted in FIG. 231A. Transformation of L. lactis with the hybrid GBS AI-1 resulted in L. lactis expression of high molecular weight polymers containing the GBS 80 and GBS 67 proteins. See FIG. 233A, which provides Western blot analysis of L. lactis transformed with the hybrid GBS AI depicted in FIG. 231A. When L. lactis transformed with the hybrid GBS AI were probed with antibodies to GBS 80 or GBS 67, high molecular weight structures were detected. See lanes labelled LL+a) in both the α-80 and α-67 immunoblots. The GBS 80 and GBS 67 proteins were confirmed to be present on the surface of L. lactis by FACS analysis. See FIG. 233B, which shows a shift in fluorescence when GBS 80 and GBS 67 antibodies are used to detect GBS 80 and GBS 67 surface expression. The same shifts in fluorescence were not observed in L. lactis control cells, cells not transformed with the hybrid GBS AI.

[0465] Alternatively, the oligomeric, pilus-like structures may be produced recombinantly. If produced in a recombinant host cell system, the AI surface protein will preferably be expressed in coordination with the expression of one or more of the AI sortases of the invention. Such AI sortases will facilitate oligomeric or hyperoligomeric formation of the AI surface protein subunits.

[0466] AI Sortases of the invention will typically have a signal peptide sequence within the first 70 amino acid residues. They may also include a transmembrane sequence within 50 amino acid residues of the C terminus. The sortases may also include at least one basic amino acid residue within the last 8 amino acids. Preferably, the sortases have one or more active site residues, such as a catalytic cysteine and histidine.

[0467] As shown in FIG. 1, AI-1 includes the surface exposed proteins of GBS 80, GBS 52 and GBS 104 and the sortases SAG0647 and SAG0648. AI-1 typically appears as an insertion into the 3′ end of the trmA gene.

[0468] In addition to the open reading frames encoding the AI-1 proteins, AI-1 may also include a divergently transcribed transcriptional regulator such as araC (i.e., the transcriptional regulator is located near or adjacent to the AI protein open reading frames, but it transcribed in the opposite direction). It is believed that araC may regulate the expression of the AI operon. (See Korbel et al., Nature Biotechnology (2004) 22(7): 911-917 for a discussion of divergently transcribed regulators in E. coli).

[0469] AI-1 may also include a sequence encoding a rho independent transcriptional terminator (see hairpin structure in FIG. 1). The presence of this structure within the adhesin island is thought to interrupt transcription after the GBS 80 open reading frame, leading to increased expression of this surface protein.

[0470] A schematic identifying AI-1 within several GBS serotypes is depicted in FIG. 2. AI-1 sequences were identified in GBS serotype V, strain isolate 2603; GBS serotype III, strain isolate NEM316; GBS serotype II, strain isolate 18RS21; GBS serotype V, strain isolate CJB111; GBS serotype III, strain isolate COH1 and GBS serotype 1a, strain isolate A909. (Percentages shown are amino acid identity to the 2603 sequence). (An AI-1 was not identified in GBS serotype 1b, strain isolate H36B or GBS serotype 1a, strain isolate 515).

[0471] An alignment of AI-1 polynucleotide sequences from serotype V, strain isolates 2603 and CJB111; serotype II, strain isolate 18RS21; serotype III, strain isolates COH1 and NEM316; and serotype 1a, strain isolate A909 is presented in FIG. 18. An alignment of amino acid sequences of AI-1 surface protein GBS 80 from serotype V, strain isolates 2603 and CJB111; serotype 1a, strain isolate A909; serotype III, strain isolates COH1 and NEM316 is presented in FIG. 22. An alignment of amino acid sequences of AI-1 surface protein GBS 104 from serotype V, strain isolates 2603 and CJB111; serotype III, strain isolates COH1 and NEM316; and serotype II, strain isolate 18RS21 is presented in FIG. 23. Preferred AI-1 polynucleotide and amino acid sequences are conserved among two or more GBS serotypes or strain isolates.

[0472] The full length of surface protein GBS 80 is particularly conserved among GBS serotypes V (strain isolates 2603 and CJBIII), III (strain isolates NEM316 and COH1), and Ia (strain isolate A909). The GBS 80 surface protein is missing or fragmented in serotypes II (strain isolate 18RS21), Ib (strain isolate H36B) and Ia (strain isolate 515).

[0473] Polynucleotide and amino acid sequences for AraC are set forth in FIG. 30.

[0474] GBS Adhesin Island 2

[0475] A second adhesin island, “Adhesin Island 2” or “AI-2” or “GBS AI-2” has also been identified in numerous GBS serotypes. A schematic depicting the correlation between AI-1 and AI-2 within the GBS serotype V, strain isolate 2603 is shown in FIG. 3. (Homology percentages in FIG. 3 represent amino acid identity of the AI-2 proteins to the AI-1 proteins). Alignments of AI-2 polynucleotide sequences are presented in FIGS. 19, 20, and 21. FIG. 19 includes sequences from serotype V, strain isolates 2603 and CJB111; serotype II, strain isolate 18RS21; serotype 1b, strain isolate H36B; and serotype 1a, strain isolate 515. FIG. 20 includes sequences from serotype V, strain isolate 2603 and serotype III, strain isolate NEM316. FIG. 21 includes sequences from serotype III, strain isolate COH1 and serotype Ia, strain isolate A909. An alignment of amino acid sequences of AI-2 surface protein GBS 067 from serotype V, strain isolates 2603 and CJB111; serotype 1a, strain isolate 515; serotype II, strain isolate 18RS21; serotype Ib, strain isolate H36B; and serotype III, strain isolate NEM316 is presented in FIG. 24. Preferred AI-2 polynucleotide and amino acid sequences are conserved among two or more GBS serotypes or strain isolates.

[0476] AI-2 comprises a series of approximately five open reading frames encoding for a collection of amino acid sequences comprising surface proteins and sortases. Specifically, AI-2 includes open reading frames encoding for two or more (i.e., 2, 3, 4, 5 or more) of GBS 67, GBS 59, GBS 150, SAG1405, SAG1406, 01520, 01521, 01522, 01523, 01523, 01524 and 01525. In one embodiment, AI-2 includes open reading frames encoding for two or more of GBS 67, GBS 59, GBS 150, SAG1405, and SAG1406. Alternatively, AI-2 may include open reading frames encoding for two or more of 01520, 01521, 01522, 01523, 01523, 01524 and 01525.

[0477] One or more of the surface proteins typically include an LPXTG motif (e.g., SEQ ID NO:122) or other sortase substrate motif. The GBS AI-2 sortase proteins are thought to be involved in the secretion and anchoring of the LPXTG containing surface proteins. GBS AI-2 may encode for at least one surface protein. Alternatively, AI-2 may encode for at least two surface proteins and at least one sortase. Preferably, GBS AI-2 encodes for at least three surface proteins and at least two sortases. One or more of the AI-2 surface proteins may include an LPXTG or other sortase substrate motif.

[0478] One or more of the surface proteins may also typically include pilin motif. The pilin motif may be involved in pili formation. Cleavage of AI surface proteins by sortase between the threonine and glycine residue of an LPXTG motif yields a thioester-linked acyl intermediate of sortase. The first lysine residue in a pilin motif can serve as an amino group acceptor of the cleaved LPXTG motif and thereby provide a covalent linkage between AI subunits to form pili. For example, the pilin motif can make a nucleophilic attack on the acyl enzyme providing a covalent linkage between AI subunits to form pili and regenerate the sortase enzyme. Some examples of pilin motifs that may be present in the GBS AI-2 proteins include ((YPKN(X₈)K; SEQ ID NO:158), (PK(X₈)K; SEQ ID NO:159), (YPK(X₉)K;SEQ ID NO:160), (PKN(X₈)K; SEQ ID NO:161), or (PK(X₁₀)K; SEQ ID NO:162)).

[0479] One or more of the surface protein may also include an E box motif. The E box motif contains a conserved glutamic acid residue that is believed to be necessary for pilus formation. Some examples of E box motifs may include the amino acid sequences YxLxETxAPxG (SEQ ID NO:163), YxxxExxAxxGY (SEQ ID NO:164), YxLxExxxPxDY (SEQ ID NO:165), or YxLxETxAPxGY (SEQ ID NO:152).

[0480] As shown in FIG. 3, GBS AI-2 may include the surface exposed proteins of GBS 67, GBS 59 and GBS 150 and the sortases of SAG1406 and SAG1405. Alternatively, GBS AI-2 may include the proteins 01521, 01524 and 01525 and sortases 01520 and 01522. GBS 067 and 01524 are preferred AI-2 surface proteins.

[0481] AI-2 may also include a divergently transcribed transcriptional regulator such as a RofA like protein (for example rogB). As in AI-1, rogB is thought to regulate the expression of the AI-2 operon.

[0482] A schematic depiction of AI-2 within several GBS serotypes is depicted in FIG. 4. (Percentages shown are amino acid identity to the 2603 sequence). While the AI-2 surface proteins GBS 59 and GBS 67 are more variable across GBS serotypes than the corresponding AI-1 surface proteins, AI-2 surface protein GBS 67 appears to be conserved in GBS serotypes where the AI-1 surface proteins are disrupted or missing.

[0483] For example, as discussed above and in FIG. 2, the AI-1 GBS 80 surface protein is fragmented in GBS serotype II, strain isolate 18RS21. Within AI-2 for this same sequence, as shown in FIG. 4, the GBS 67 surface protein has 99% amino acid sequence homology with the corresponding sequence in strain isolate 2603. Similarly, the AI-1 GBS 80 surface protein appears to be missing in GBS serotype Ib, strain isolate H36B and GBS serotype Ia, strain isolate 515. Within AI-2 for these sequences, however, the GBS 67 surface protein has 97-99% amino acid sequence homology with the corresponding sequence in strain isolate 2603. GBS 67 appears to have two allelic variants, which can be divided according to percent homology with strains 2603 (GBS67²⁶⁰³) and H36B (GBS67^{H36B}). See FIGS. 237-239.

[0484] Unlike for GBS 67, amino acid sequence identity of GBS 59 is variable across different GBS strains. As shown in FIGS. 63 and 224, GBS 59 of GBS strain isolate 2603 shares 100% amino acid residue homology with GBS strain 18RS21, 62% amino acid sequence homology with GBS strain H36B, 48% amino acid residue homology with GBS strain 515 and GBS strain CJB111, and 47% amino acid residue homology with GBS strain NEM316. The amino acid sequence homologies of the different GBS strains suggest that there are two isoforms of GBS 59. The first isoform appears to include the GBS 59 protein of GBS strains CJB111, NEM316, and 515 (GBS59^{CJB111}, GBS59^{NEM316} and GBS59⁵¹⁵ respectively). The second isoform appears to include the GBS 59 protein of GBS strains 18RS21, 2603, and H36B. GBS59^{18RS21}, GBS59²⁶⁰³ and GBS59^{H36B} respectively. See FIGS. 63 and 224. All newly sequenced strains were deposited at American Type Culture Collection under the following accession numbers: A909, BAA-1138; CJB111, BAA-23; H36b, BAA-1174; 18RS21, BAA-1175; COH1, BAA-1176; and 515, BAA-1177. References for the eight strains are as follows: NEM316 (Glaser et al., Mol. Microbiol. 45, 1499-1513, 2002); 2603V/R (Tettelin et al., Proc. Nati. Acad. Sci. USA 99, 12391-96, 2002); A909, H36B, and 18RS21 (Lancefield et al., J. Exp. Med. 142, 165-79, 1975); 515 (Wessels et al., Infect. Immun. 61, 4760-66, 1993); COH1 (Wilson & Weaver, J. Infect. Dis. 152, 323-29, 1985); and CJB111 (Carol Baker Collection, Division of Infectious Diseases, Baylor College of Medicine, Houston). From Tettelin et al., Proc. Natl. Acad. Sci. USA 102, 13950-55, 2005.

[0485] As expected from the variability in GBS 59 isoforms, antibodies specific for the first GBS 59 isoform detect the first but not the second GBS 59 isoform and antibodies specific for the second GBS 59 isoform detect the second but not the first GBS 59 isoform. See FIG. 226A, which shows FACS analysis of 28 GBS strains having a GBS 59 gene detected using PCR for GBS 59 surface expression. For each of the 28 GBS strains, FACS analysis was performed using either an antibody for GBS 59 isoform 1 (α-cjb111) or GBS 59 isoform 2 (α-2603). Only one of the two antibodies detected GBS 59 surface expression on each GBS strain. As a negative control, GBS strains in which a GBS 59 gene was not detectable by PCR did not have significant GBS 59 surface expression levels. FIG. 226B.

[0486] Also, GBS 59 is opsonic only against GBS strains expressing a homologous GBS 59 protein. See FIG. 225.

[0487] In one embodiment, the immunogenic composition of the invention comprises a first and a second isoform of the GBS 59 protein to provide protection across a wide range of GBS serotypes that express polypeptides from a GBS AI-2. The first isoform may be the GBS 59 protein of GBS strain CJB111, NEM316, or 515 (i.e., GBS59^{CJB111}, GBS59^{NEM316} and GBS59⁵¹⁵). The second isoform may be the GBS 59 protein of GBS strain 18RS21, 2603, or H36B (i.e., GBS59^{18RS21}, GBS59²⁶⁰³ and GBS59^{H36B})To further investigate GBS59 distribution, presence of GBS59 gene in 80 different GBS isolates was assessed by PCR and the resulting amplicons were sequenced. Table 53 summarizes the sequence analysis results for the 65 positive strains (81%). The various GBS59 sequences thus obtained suggest that GBS59 isoforms can be further grouped in 6 main allelic families, as schematized in FIG. 240. Each sequence member of an allelic family has been compared to the first representative strain in the list of different isolates (i.e., GBS59^{CJB111}, GBS59^{DK21}, GBS59⁵¹⁵, GBS59^{CJB110}, GBS59²⁶⁰³ and GBS59^{II36B}).

TABLE 53

| | | GBS 59 | | |
|---|---|---|---|---|
| GBS strains | Type | variant | % identity | aa not matching/aa total |
| 515 | Ia | 515 | 100 | |
| DK1 | | 515 | 100 | 0/675 |
| DK8 | | 515 | 100 | 0/675 |
| Davis | | 515 | 100 | 0/675 |
| 2986 | | 515 | 100 | 0/675 |
| 5551 | | 515 | 100 | 0/675 |
| cdc-11 | | 515 | 100 | 0/675 |
| cdc-13 | | 515 | 100 | 0/675 |
| cdc-22 | | 515 | 100 | 0/675 |
| cdc-31 | | 515 | 100 | 0/675 |
| cdc-25 | | 515 | 100% + 11aa | 0/675 + 11aa |
| 2110 | V | 515 | 100 | 0/675 |
| 2210 | IV | 515 | 100 | 0/675 |
| CJB111 | V | CJB111 | 100 | |
| 5364 | | CJB111 | 100 | 0/674 |
| cdc-4 | | CJB111 | 100 | 0/674 |
| cdc-6 | | CJB111 | 100 | 0/674 |
| cdc-12 | | CJB111 | 100 | 0/674 |
| cdc-16 | | CJB111 | 100 | 0/674 |
| cdc-20 | | CJB111 | 100 | 0/674 |
| cdc-23 | | CJB111 | 100 | 0/674 |
| cdc-28 | | CJB111 | 100 | 0/674 |
| cdc-30 | | CJB111 | 100 | 0/674 |
| cdc-35 | | CJB111 | 100 | 0/674 |
| cdc-40 | | CJB111 | 100 | 0/674 |
| 7357b- | Ib | CJB111 | 100 | 0/674 |
| 5518 | | CJB111 | 100 | 0/674 |
| cdc-2 | | CJB111 | 100 | 0/674 |
| cdc-36 | | CJB111 | 100 | 0/674 |
| cdc-3 | II | CJB111 | 100 | 0/674 |
| cdc-21 | | CJB111 | 100 | 0/674 |
| 1999 | IV | CJB111 | 100 | 0/674 |
| D136C | III | CJB111 | 98.4 | 11/674 |
| nem316 | | CJB111 | 98.4 | 11/674 |
| COH31 | | CJB111 | 98.2 | 12/674 |
| 5408 | VIII | CJB111 | 98.4 | 11/674 |
| DK21 | II | dk21 | 100 | |
| cdc-1 | | dk21 | 99.3 | 5/682 |
| cdc-5 | | dk21 | 100 | 0/682 |
| cdc-9 | | dk21 | 100 | 0/682 |
| cdc-26 | | dk21 | 100 | 0/432 gap di 250aa |
| cdc-41 | | dk21 | 100 | 0/682 |
| cdc-47 | | dk21 | 99.8 | 1/669 gap di 13aa |
| 1169 | NT | dk21 | 100 | 0/682 |
| 515 | Ia | 515 | 100 | |
| DK1 | | 515 | 100 | 0/675 |
| DK8 | | 515 | 100 | 0/675 |
| Davis | | 515 | 100 | 0/675 |
| 2986 | | 515 | 100 | 0/675 |
| 5551 | | 515 | 100 | 0/675 |
| cdc-11 | | 515 | 100 | 0/675 |
| cdc-13 | | 515 | 100 | 0/675 |
| cdc-22 | | 515 | 100 | 0/675 |
| cdc-31 | | 515 | 100 | 0/675 |
| cdc-25 | | 515 | 100% + 11aa | 0/675 + 11aa |
| 2110 | V | 515 | 100 | 0/675 |
| 2210 | IV | 515 | 100 | 0/675 |
| CJB111 | V | CJB111 | 100 | |
| 5364 | | CJB111 | 100 | 0/674 |
| cdc-4 | | CJB111 | 100 | 0/674 |
| cdc-6 | | CJB111 | 100 | 0/674 |
| cdc-12 | | CJB111 | 100 | 0/674 |
| cdc-16 | | CJB111 | 100 | 0/674 |
| cdc-20 | | CJB111 | 100 | 0/674 |
| cdc-23 | | CJB111 | 100 | 0/674 |
| cdc-28 | | CJB111 | 100 | 0/674 |
| cdc-30 | | CJB111 | 100 | 0/674 |
| cdc-35 | | CJB111 | 100 | 0/674 |
| cdc-40 | | CJB111 | 100 | 0/674 |
| 7357b- | Ib | CJB111 | 100 | 0/674 |
| 5518 | | CJB111 | 100 | 0/674 |
| cdc-2 | | CJB111 | 100 | 0/674 |
| cdc-36 | | CJB111 | 100 | 0/674 |
| cdc-3 | II | CJB111 | 100 | 0/674 |
| cdc-21 | | CJB111 | 100 | 0/674 |
| 1999 | IV | CJB111 | 100 | 0/674 |
| D136C | III | CJB111 | 98.4 | 11/674 |
| nem316 | | CJB111 | 98.4 | 11/674 |
| COH31 | | CJB111 | 98.2 | 12/674 |
| 5408 | VIII | CJB111 | 98.4 | 11/674 |
| DK21 | II | dk21 | 100 | |
| cdc-1 | | dk21 | 99.3 | 5/682 |
| cdc-5 | | dk21 | 100 | 0/682 |
| cdc-9 | | dk21 | 100 | 0/682 |
| cdc-26 | | dk21 | 100 | 0/432 gap di 250aa |
| cdc-41 | | dk21 | 100 | 0/682 |
| cdc-47 | | dk21 | 99.8 | 1/669 gap di 13aa |
| 1169 | NT | dk21 | 100 | 0/682 |
| 2603 | V | 2603 | 100 | |
| 1998 | III | 2603 | 100 | 0/705 |
| cdc-17 | | 2603 | 100 | 0/705 |
| cdc-19 | | 2603 | 100 | 0/705 |
| cdc-44 | | 2603 | 99.9 | 1/705 |
| cdc-46 | | 2603 | 99.9 | 1/705 |
| cdc-48 | | 2603 | 97.3 | 20/705 |
| cdc-49 | | 2603 | 100 | 0/705 |
| cdc-27 | | 2603 | 99.9 | 1/705 |
| 18RS21 | II | 2603 | 100 | 0/705 |
| 3050 | | 2603 | 100 | 0/705 |
| 2141 | | 2603 | 100 | 0/705 |
| 2928 | VII | 2603 | 99.9 | 1/705 |
| H36B | Ib | H36B | 100 | |
| 2129 | | H36B | 99.7 | 2/693 |
| 5401 | II | H36B | 99.9 | 1/693 |
| cdc-39 | | H36B | 99.7 | 2/693 |
| 2274 | IV | H36B | 99.9 | 1/693 |
| CJB110 | NT | cjb110 | 100 | 0/704aa |
| 090 | Ia | cjb110 | 100 | 0/475 + stop codon |
| cdc-10 | | cjb110 | 100 | 0/704aa |

| | | GBS 59 |
|---|---|---|
| GBS strains | Type | PCR |
| A909 | Ia | — |
| cdc-7 | III | — |
| cdc-8 | III | — |
| cdc-14 | III | — |
| cdc-15 | III | — |
| cdc-18 | III | — |
| cdc-34 | III | — |
| COH1 | III | — |
| M732 | III | — |
| M781 | III | — |
| 5376 | III | — |
| 5435 | III | — |
| 2177 | Ib | — |
| SMU071 | VIII | — |
| JM9130013 | VIII | — |

[0488] Members of the same allelic family will typically have 75% sequence identity or more (e.g. 80%, 85%, 90%, 91%, 92%, 93%, 94%, 95%, 96%, 97%, 98%, 99%, 99.5%). More preferably, members of the same allelic family will have 97% or more sequence identity or more. Even more preferably, members of the same allelic family will exhibit immunological cross-reactivity. As used herein, the term “cross-reactivity” refers to the characteristic of an antigen to elicit an immune response effective against more than one strain of GBS (e.g., heterologous GBS strains). According to this classification, two new variants of GBS59 are distinguishable: one represented by GBS59 from strain CJB110 (i.e., GBS59^{CJB110}) and the second represented by GBS59, encoded from strain DK21 (i.e., GBS59^{DK21}). As shown in FIG. 240, GBS59^{CJB110} amino acid sequence is 72% identical to that of GBS59²⁶⁰³ and GBS59^{DK21} shares 71% sequence identity with GBS59^{CJB111}.

[0489] Accordingly, immunogenic composition of the invention for the treatment or prophylaxis of GBS infections may be further improved by combining GBS59 polypeptides from different allelic families or fragments thereof, in order to increase strain coverage. In some embodiments, when no cross-reactivity is detected between two or more allelic families, the combination will preferably include representative polypeptides from each allelic family. In further embodiments, when GBS59 polypeptides from different allelic families cross-react, the immunogenic composition of the invention may include only one representative polypeptide. In other embodiments, when an allelic family contains GBS59 polypeptides from specifically virulent strains, the immunogenic composition of the invention will preferably contain representative antigens from that allelic family.

[0490] Immunizations with GBS59 polypeptides of the invention are discussed further in the Examples.

[0491] The gene encoding GBS 59 has been identified in a high number of GBS isolates; the GBS 59 gene was detected in 31 of 40 GBS isolates tested (77.5%). The GBS 59 protein also appears to be present as part of a pilus in whole extracts derived from GBS strains. FIG. 64 shows detection of high molecular weight GBS 59 polymers in whole extracts of GBS strains CJB111, 7357B, COH31, D1363C, 5408, 1999, 5364, 5518, and 515 using antiserum raised against GBS 59 of GBS strain CJB111. FIG. 65 also shows detection of these high molecular weight GBS 59 polymers in whole extracts of GBS strains D136C, 515, and CJB111 with anti-GBS 59 antiserum. (See also FIG. 220A for detection of GBS 59 high molecular weight polymers in strain 515.) FIG. 65 confirms the presence of different isoforms of GBS 59. Antisera raised against two different GBS 59 isoforms results in different patterns of immunoreactivity depending on the GBS strain origin of the whole extract. FIG. 65 further shows detection of GBS 59 monomers in purified GBS 59 preparations. GBS 59 is also highly expressed on the surface of GBS strains. GBS 59 was detected on the surface of GBS strains CJB111, DK1, DK8, Davis, 515, 2986, 5551, 1169, and 7357B by FACS analysis using mouse antiserum raised against GBS 59 of GBS CJB111. FACS analysis did not detect surface expression of GBS 59 in GBS strains SMU071, JM9130013, and COH1, which do not contain a GBS 59 gene. (See FIG. 66.) Further confirmation that GBS 59 is expressed on the surface of GBS is detection of GBS 59 by immuno-electron microscopy on the surface of GBS strain 515 bacteria. See FIG. 215.

[0492] GBS 67 and GBS 150 also appear to be included in high molecular weight structures, or pili. FIG. 69 shows that anti-GBS 67 and anti-GBS 150 immunoreact with high molecular weight structures in whole GBS strain 515 extracts. (See also FIG. 220B and C.) It is also notable in FIG. 69 that the anti-GBS 59 antisera, raised in a mouse following immunization with GBS 59 of GBS strain 2603, does not cross-hybridize with GBS 59 in GBS strain 515. GBS 59 of GBS stain 515 is of a different isotype than GBS 59 of GBS stain 2603. See FIG. 63, which illustrates that the homology of these two GBS 59 polypeptides is 48%, and FIG. 65, which confirms that GBS 59 antisera raised against GBS strain 2603 does not cross-hybridize with GBS 59 of GBS strain 515.

[0493] Formation of pili containing GBS 150 does not appear to require GBS 67 expression. FIG. 70 provides Western blots showing that higher molecular weight structures in GBS strain 515 total extracts immunoreact with anti-GBS 67 and anti-GBS 150 antiserum. In a GBS strain 515 lacking GBS 67 expression, anti-GBS 67 antiserum no longer immunoreacts with polypeptides in total extracts, while anti-GBS 150 antiserum is still able to cross-hybridize with high molecular weight structures.

[0494] Likewise, formation of pili containing GBS 59 does not appear to require GBS 67 expression. As expected, FACS detects GBS 67 cell surface expression on wildtype GBS strain 515, but not GBS strain 515 cells knocked out for GBS 67. FACS analysis using anti-GBS 59 antisera, however, detects GBS 59 expression on both the wildtype GBS strain 515 cells and the GBS strain 515 cells knocked out for GBS 67. Thus, GBS 59 cell surface expression is detected on GBS stain 515 cells regardless of GBS 67 expression.

[0495] GBS 67, while present in pili, appears to be localized around the surface of GBS strain 515 cells. See the immuno-electron micrographs presented in FIG. 216. GBS 67 binds to fibronectin. See FIG. 217.

[0496] Formation of pili encoded by GBS AI-2 does require expression of GBS 59. Deletion of GBS 59 from strain 515 bacteria eliminates detection of high molecular weight structures by antibodies that bind to GBS 59 (FIG. 221A, lane 3), GBS 67 (FIG. 221B, lane 3), and GBS 150 (FIG. 221C, lane 3). By contrast, Western blot analysis of 515 bacteria with a deletion of the GBS 67 gene detects high molecular weight structures using GBS 59 (FIG. 221A, lane 2) and GBS 150 (FIG. 221C, lane 2) antisera. Similarly, Western blot analysis of 515 bacteria with a deletion of the GBS 150 gene detects high molecular weight structures using GBS 59 (FIG. 221A, lane 4) and GBS 67 (FIG. 221B, lane 4). See also FIG. 223, which provides Western blots of each of the 515 strains interrogated with antibodies for GBS 59, GBS 67, and GBS 150. FACS analysis of strain 515 bacteria deleted for either GBS 59 or GBS 67 confirms these results. See FIG. 222, which shows that only deletion of GBS 59 abolishes surface expression of both GBS 59 and GBS 67.

[0497] Formation of pili encoded by GBS AI-2 also requires expression of both GBS adhesin island-2 encoded sortases. See FIG. 218, which provides Western blot analysis of strain 515 bacteria lacking Srt1, Srt2, or both Srt1 and Srt2. Only deletion of both Srt1 and Srt2 abolishes pilus assembly as detected by antibodies that cross-hybridize with each of GBS 59, GBS 67 and GBS 150. The results of the Western blot analysis were verified by FACS, which provided similar results. See FIG. 219.

[0498] As shown in FIG. 4, two of the GBS strain isolates (COH 1 and A909) do not appear to contain homologues to the surface proteins GBS 59 and GBS 67. For these two strains, the percentages shown in FIG. 4 are amino acid identity to the COH1 protein). Notwithstanding the difference in the surface protein lengths for these two strains, AI-2 within these sequences still contains two sortase proteins and three LPXTG containing surface proteins, as well as a signal peptidase sequence leading into the first surface protein. One of the surface proteins in this variant of AI-2, spb1, has previously been identified as a potential adhesion protein. (See Adderson et al., Infection and Immunity (2003) 71(12):6857-6863). Alternatively, because of the lack of GBS 59 and GBS 67 sequences, this variant of AI-2 may be a third type of AI (Adhesin Island-3, AI-3, or GBS AI-3).

[0499] More than one AI surface protein may be present in the oligomeric, pilus-like structures of the invention. For example, GBS 59 and GBS 67 may be incorporated into an oligomeric structure. Alternatively, GBS 59 and GBS 150 may be incorporated into an oligomeric structure, or GBS 59, GBS 150 and GBS 67 may be incorporated into an oligomeric structure.

[0500] In another embodiment, the invention includes compositions comprising two or more AI surface proteins. The composition may include surface proteins from the same adhesin island. For example, the composition may include two or more GBS AI-2 surface proteins, such as GBS 59, GBS 67 and GBS 150. The surface proteins may be isolated from Gram positive bacteria or they may be produced recombinantly.

### GAS Adhesin Islands

[0501] Applicants have identified at least six different GAS Adhesin Islands. These adhesion islands are thought to encode surface proteins which are important in the bacteria's virulence, and Applicants have obtained the first electron micrographs revealing the presence of these adhesin island proteins in hyperoligomeric pilus structures on the surface of Group A Streptococcus.

[0502] Group A Streptococcus is a human specific pathogen which causes a wide variety of diseases ranging from pharyngitis and impetigo through life threatening invasive disease and necrotizing fasciitis. In addition, post-streptococcal autoimmune responses are still a major cause of cardiac pathology in children.

[0503] Group A Streptococcal infection of its human host can generally occur in three phases. The first phase involves attachment and/or invasion of the bacteria into host tissue and multiplication of the bacteria within the extracellular spaces. Generally this attachment phase begins in the throat or the skin. The deeper the tissue level infected, the more severe the damage that can be caused. In the second stage of infection, the bacteria secretes a soluble toxin that diffuses into the surrounding tissue or even systemically through the vasculature. This toxin binds to susceptible host cell receptors and triggers inappropriate immune responses by these host cells, resulting in pathology. Because the toxin can diffuse throughout the host, the necrosis directly caused by the GAS toxins may be physically located in sites distant from the bacterial infection. The final phase of GAS infection can occur long after the original bacteria have been cleared from the host system. At this stage, the host's previous immune response to the GAS bacteria due to cross reactivity between epitopes of a GAS surface protein, M, and host tissues, such as the heart. A general review of GAS infection can be found in Principles of Bacterial Pathogenesis, Groisman ed., Chapter 15 (2001).

[0504] In order to prevent the pathogenic effects associated with the later stages of GAS infection, an effective vaccine against GAS will preferably facilitate host elimination of the bacteria during the initial attachment and invasion stage.

[0505] Isolates of Group A Streptococcus are historically classified according to the M surface protein described above. The M protein is surface exposed trypsin-sensitive protein generally comprising two polypeptide chains complexed in an alpha helical formation. The carboxyl terminus is anchored in the cytoplasmic membrane and is highly conserved among all group A streptococci. The amino terminus, which extend through the cell wall to the cell surface, is responsible for the antigenic variability observed among the 80 or more serotypes of M proteins.

[0506] A second layer of classification is based on a variable, trypsin-resistant surface antigen, commonly referred to as the T-antigen. Decades of epidemiology based on M and T serological typing have been central to studies on the biological diversity and disease causing potential of Group A Streptococci. While the M-protein component and its inherent variability have been extensively characterized, even after five decades of study, there is still very little known about the structure and variability of T-antigens. Antisera to define T types is commercially available from several sources, including Sevapharma (sevapharma.cz/en).

[0507] The gene coding for one form of T-antigen, T-type 6, from an M6 strain of GAS (D741) has been cloned and characterized and maps to an approximately 11 kb highly variable pathogenicity island. Schneewind et al., J Bacteriol. (1990) 172(6):3310-3317. This island is known as the Fibronectin-binding, Collagen-binding T-antigen (FCT) region because it contains, in addition to the T6 coding gene (tee6), members of a family of genes coding for Extra Cellular Matrix (ECM) binding proteins. Bessen et al., Infection & Immunity (2002) 70(3):1159-1167. Several of the protein products of this gene family have been shown to directly bind either fibronectin and/or collagen. See Hanski et al., Infection & Immunity (1992) 60(12):5119-5125; Talay et al., Infection & Immunity (1992(60(9):3837-3844; Jaffe et al. (1996) 21(2):373-384; Rocha et al., Adv Exp Med Biol. (1997) 418:737-739; Kreikemeyer et al., J Biol Chem (2004) 279(16):15850-15859; Podbielski et al., Mol. Microbiol. (1999) 31(4):1051-64; and Kreikemeyer et al., Int. J. Med Microbiol (2004) 294(2-3):177-88. In some cases direct evidence for a role of these proteins in adhesion and invasion has been obtained.

[0508] Applicants raised antiserum against a recombinant product of the tee6 gene and used it to explore the expression of T6 in M6 strain 2724. In immunoblot of mutanolysin extracts of this strain, the antiserum recognized, in addition to a band corresponding to the predicted molecular mass of the product, very high molecular weight ladders ranging in mobility from about 100 kDa to beyond the resolution of the 3-8% gradient gels used.

[0509] This pattern of high molecular weight products is similar to that observed in immunoblots of the protein components of the pili identified in Streptococcus agalactiae (described above) and previously in Corynebacterium diphtheriae. Electron microscopy of strain M6_{—}2724 with antisera specific for the product of tee6 revealed abundant surface staining and long pilus like structures extending up to 700 nanometers from the bacterial surface, revealing that the T6 protein, one of the antigens recognized in the original Lancefield serotyping system, is located within a GAS Adhesin Island (GAS AI-1) and forms long covalently linked pilus structures.

[0510] Applicants have identified at least six different Group A Streptococcus Adhesin Islands. While these GAS AI sequences can be identified in numerous M types, Applicants have surprisingly discovered a correlation between the four main pilus subunits from the four different GAS AI types and specific T classifications. While other trypsin-resistant surface exposed proteins are likely also implicated in the T classification designations, the discovery of the role of the GAS adhesin islands (and the associated hyper-oligomeric pilus like structures) in T classification and GAS serotype variance has important implications for prevention and treatment of GAS infections. Applicants have identified protein components within each of the GAS adhesin islands which are associated with the pilus formation. These proteins are believed to be involved in the bacteria's initial adherence mechanisms. Immunological recognition of these proteins may allow the host immune response to slow or prevent the bacteria's transition into the more pathogenic later stages of infection.

[0511] In addition, Applicants have discovered that the GBS pili structures appear to be implicated in the formation of biofilms (populations of bacteria growing on a surface, often enclosed in an exopolysaccharide matrix). Biofilms are generally associated with bacterial resistance, as antibiotic treatments and host immune response are frequently unable to eradicate all of the bacteria components of the biofilm. Direction of a host immune response against surface proteins exposed during the first steps of bacterial attachment (i.e., before complete biofilm formation) is preferable.

[0512] The invention therefore provides for improved immunogenic compositions against GAS infection which may target GAS bacteria during their initial attachment efforts to the host epithelial cells and may provide protection against a wide range of GAS serotypes. The immunogenic compositions of the invention include GAS AI surface proteins which may be formulated in an oligomeric, or hyperoligomeric (pilus) form. The invention also includes combinations of GAS AI surface proteins. Combinations of GAS AI surface proteins may be selected from the same adhesin island or they may be selected from different GAS adhesin islands.

[0513] While there is surprising variability in the number and sequence of the GAS AI components across isolates, GAS AI sequences may be generally characterized as Type 1, Type 2, Type 3, and Type 4, depending on the number and type of sortase sequence within the island and the percentage identity of other proteins within the island. Schematics of the GAS adhesin islands are set forth in FIG. 51A and FIG. 162. In all strains identified so far, the adhesin island region is flanked by highly conserved open reading frames M1_{—}123 and M1_{—}36. Between three and five genes in each GAS adhesin island code for ECM binding adhesin proteins containing LPXTG motifs.

[0514] GAS Adhesin Island 1

[0515] As discussed above, Applicants have identified adhesin islands, “GAS Adhesin Island 1” or “GAS AI-1,” within the genome Group A Streptococcus serotypes and isolates. GAS AI-1 comprises a series of approximately five open reading frames encoding for a collection of amino acid sequences comprising surface proteins and sortases (“GAS AI-1 proteins”). GAS AI-1 preferably comprises surface proteins, a srtB sortase, and a rofA divergently transcribed transcriptional regulator. GAS AI-1 surface proteins may include a fibronectin binding protein, a collagen adhesion protein and a fimbrial structural subunit. Preferably, each of these GAS AI-1 surface proteins includes an LPXTG sortase substrate motif, such as LPXTG (SEQ ID NO:122) or LPXSG (SEQ ID NO:134) (conservative replacement of threonine with serine). Specifically, GAS AI-1 includes open reading frames encoding for two or more (i.e., 2, 3, 4 or 5) of M6_Spy0157, M6_Spy0158, M6_Spy0159, M6_Spy0160, M6_Spy0161.

[0516] Applicants have also identified open reading frames encoding fimbrial structural subunits in other GAS bacteria harbouring an AI-1. These open reading frames encode fimbrial structural subunits CDC SS 410_fimbrial, ISS3650_fimbrial, and DSM2071_fimbrial. A GAS AI-1 may comprise a polynucleotide encoding any one of CDC SS 410_fimbrial, ISS3650_fimbrial, and DSM2071_fimbrial.

[0517] As discussed above, the hyper-oligomeric pilus structure of GAS AI-1 appears to be responsible for the T-antigen type 6 classification, and GAS AI-1 corresponds to the FCT region previously identified for tee6. As in GAS AI-1, the tee6 FCT region includes open reading frames encoding for a collagen adhesion protein (cpa, capsular polysaccharide adhesion) and a fibronectin binding protein (prtF1). Immunoblots of tee6, a GAS AI-1 fimbrial structural subunit corresponding to M6_Spy160, reveal high molecular weight structures indicative of the hyper-oligomeric pilus structures Immunoblots with antiserum specific for Cpa also recognize a high molecular weight ladder structure, indicating Cpa involvement in the GAS AI-1 pilus structure or formation. In EM photos of GAS bacteria, Cpa antiserum reveals abundant staining on the surface of the bacteria and occasional gold particles extended from the surface of the bacteria. In contrast, immunoblots with antiserum specific for PrtF1 recognize only a single molecular species with electrophoretic mobility corresponding to its predicted molecular mass, indicating that PrtF1 may not be associated with the oligomeric pilus structure. A preferred immunogenic composition of the invention comprises a GAS AI-1 surface protein which may be formulated or purified in an oligomeric (pilus) form. In a preferred embodiment, the oligomeric form is a hyperoligomer. Another preferred immunogenic composition of the invention comprises a GAS AI-1 surface protein which has been isolated in an oligomeric (pilus) form. The oligomer or hyperoligomeric pilus structures comprising the GAS AI-1 surface proteins may be purified or otherwise formulate for use in immunogenic compositions.

[0518] One or more of the GAS AI-1 open reading frame polynucleotide sequences may be replaced by a polynucleotide sequence coding for a fragment of the replaced ORF. Alternatively, one or more of the GAS AI-1 open reading frames may be replaced by a sequence having sequence homology to the replaced ORF.

[0519] One or more of the GAS AI-1 surface protein sequences typically include an LPXTG motif (e.g., SEQ ID NO:122) or other sortase substrate motif.

[0520] The LPXTG sortase substrate motif of a GAS AI surface protein may be generally represented by the formula XXXXG, wherein X at amino acid position 1 is an L, a V, an E, or a Q, wherein X at amino acid position 2 is a P if X at amino acid position 1 is an L, wherein X at amino acid position 2 is a V if X at amino acid position 1 is a E or a Q, wherein X at amino acid position 2 is a V or a P if X at amino acid position 1 is a V, wherein X at amino acid position 3 is any amino acid residue, wherein X at amino acid position 4 is a T if X at amino acid position 1 is a V, E, or Q, and wherein X at amino acid position 4 is a T, S, or A if X at amino acid position 1 is an L. Some examples of LPXTG motifs present in GAS AI surface proteins include LPSXG (SEQ ID NO:134), VVXTG (SEQ ID NO:135), EVXTG (SEQ ID NO:136), VPXTG (SEQ ID NO:137), QVXTG (SEQ ID NO:138), LPXAG (SEQ ID NO:139), QVPTG (SEQ ID NO:140), and FPXTG (SEQ ID NO:141).

[0521] The GAS AI surface proteins of the invention may affect the ability of the GAS bacteria to adhere to and invade epithelial cells. AI surface proteins may also affect the ability of GAS to translocate through an epithelial cell layer. Preferably, one or more GAS AI surface proteins are capable of binding to or otherwise associating with an epithelial cell surface. GAS AI surface proteins may also be able to bind to or associate with fibrinogen, fibronectin, or collagen.

[0522] The GAS AI-1 sortase proteins are predicted to be involved in the secretion and anchoring of the LPXTG containing surface proteins. GAS AI-1 may encode for at least one surface protein. Alternatively, GAS AI-1 may encode for at least two surface exposed proteins and at least one sortase. Preferably, GAS AI-1 encodes for at least three surface exposed proteins and at least two sortases.

[0523] The AI surface proteins may be covalently attached to the bacterial cell wall by membrane-associated transpeptidases, such as an AI sortase. The sortase may function to cleave the surface protein, preferably between the threonine and glycine residues of an LPXTG motif. The sortase may then assist in the formation of an amide link between the threonine carboxyl group and a cell wall precursor such as lipid II. The precursor can then be incorporated into the peptidoglycan via the transglycoslylation and transpeptidation reactions of bacterial wall synthesis. See Comfort et al., Infection & Immunity (2004) 72(5): 2710-2722.

[0524] GAS AI-1 preferably includes a srtB sortase. GAS srtB sortases may preferably anchor surface proteins with an LPSTG motif (SEQ ID NO:166), particularly where the motif is followed by a serine.

[0525] In one embodiment, the invention includes a composition comprising oligomeric, pilus-like structures comprising a GAS AI-1 surface protein such as M6_Spy0157, M6_Spy0159, M6_Spy0160, CDC SS 410_fimbrial, ISS3650_fimbrial, or DSM2071_fimbrial. The oligomeric, pilus-like structure may comprise numerous units of AI surface protein. Preferably, the oligomeric, pilus-like structures comprise two or more AI surface proteins. Still more preferably, the oligomeric, pilus-like structure comprises a hyper-oligomeric pilus-like structure comprising at least two (e.g., 2, 3, 4, 5, 6, 7, 8, 9, 10, 11, 12, 13, 14, 15, 20, 25, 30, 35, 40, 45, 50, 60, 70, 80, 90, 100, 120, 140, 150, 200 or more) oligomeric subunits, wherein each subunit comprises an AI surface protein or a fragment thereof. The oligomeric subunits may be covalently associated via a conserved lysine within a pilin motif. The oligomeric subunits may be covalently associated via an LPXTG motif, preferably, via the threonine or serine amino acid residue, respectively.

[0526] AI surface proteins or fragments thereof to be incorporated into the oligomeric, pilus-like structures of the invention will preferably include a pilin motif.

[0527] The oligomeric, pilus like structures may be used alone or in the combinations of the invention. In one embodiment, the invention comprises a GAS Adhesin Island protein in oligomeric form, preferably in a hyperoligomeric form. In one embodiment, the invention comprises a composition comprising one or more GAS Adhesin Island 1 (“GAS AI-1”) proteins and one or more GAS Adhesin Island 2 (“GAS AI-2”), GAS Adhesin Island 3 (“GAS AI-3”), GAS Adhesin Island 4 (“GAS AI-4”), GAS Adhesin Island 5 (“GAS AI-5”), or GAS Adhesin Island 6 (“GAS AI-6”) proteins, wherein one or more of the GAS Adhesin Island proteins is in the form of an oligomer, preferably in a hyperoligomeric form.

[0528] In addition to the open reading frames encoding the GAS AI-1 proteins, GAS AI-1 may also include a divergently transcribed transcriptional regulator such as RofA (i.e., the transcriptional regulator is located near or adjacent to the AI protein open reading frames, but it transcribed in the opposite direction).

### GAS Adhesin Island 2

[0529] A second adhesin island, “GAS Adhesin Island 2” or “GAS AI-2” has also been identified in Group A Streptococcus serotypes and isolates. GAS AI-2 comprises a series of approximately eight open reading frames encoding for a collection of amino acid sequences comprising surface proteins and sortases (“GAS AI-2 proteins”). Specifically, GAS AI-2 includes open reading frames encoding for two or more (i.e., 2, 3, 4, 5, 6, 7, or 8) of GAS 15, Spy0127, GAS16, GAS17, GAS18, Spy0131, Spy0133, and GAS20.

[0530] A preferred immunogenic composition of the invention comprises a GAS AI-2 surface protein which may be formulated or purified in an oligomeric (pilus) form. In a preferred embodiment, the oligomeric form is a hyperoligomer. Another preferred immunogenic composition of the invention comprises a GAS AI-2 surface protein which has been isolated in an oligomeric (pilus) form. The oligomer or hyperoligomeric pilus structures comprising the GAS AI-2 surface proteins may be purified or otherwise formulate for use in immunogenic compositions.

[0531] One or more of the GAS AI-2 open reading frame polynucleotide sequences may be replaced by a polynucleotide sequence coding for a fragment of the replaced ORF. Alternatively, one or more of the GAS AI-2 open reading frames may be replaced by a sequence having sequence homology to the replaced ORF.

[0532] One or more of the GAS AI-2 surface protein sequences typically include an LPXTG motif (e.g., SEQ ID NO:122) or other sortase substrate motif. The AI surface proteins of the invention may affect the ability of the GAS bacteria to adhere to and invade epithelial cells. AI surface proteins may also affect the ability of GAS to translocate through an epithelial cell layer. Preferably, one or more AI surface proteins are capable of binding to or otherwise associating with an epithelial cell surface. AI surface proteins may also be able to bind to or associate with fibrinogen, fibronectin, or collagen.

[0533] The GAS AI-2 sortase proteins are predicted to be involved in the secretion and anchoring of the LPXTG containing surface proteins. GAS AI-2 may encode for at least one surface protein. Alternatively, GAS AI-2 may encode for at least two surface exposed proteins and at least one sortase. Preferably, GAS AI-2 encodes for at least three surface exposed proteins and at least two sortases.

[0534] The AI surface proteins may be covalently attached to the bacterial cell wall by membrane-associated transpeptidases, such as an AI sortase. The sortase may function to cleave the surface protein, preferably between the threonine and glycine residues of an LPXTG motif. The sortase may then assist in the formation of an amide link between the threonine carboxyl group and a cell wall precursor such as lipid II. The precursor can then be incorporated into the peptidoglycan via the transglycoslylation and transpeptidation reactions of bacterial wall synthesis. See Comfort et al., Infection & Immunity (2004) 72(5): 2710-2722.

[0535] In one embodiment, the invention includes a composition comprising oligomeric, pilus-like structures comprising an AI surface protein such as GAS15, GAS16, or GAS18. The oligomeric, pilus-like structure may comprise numerous units of AI surface protein. Preferably, the oligomeric, pilus-like structures comprise two or more AI surface proteins. Still more preferably, the oligomeric, pilus-like structure comprises a hyper-oligomeric pilus-like structure comprising at least two (e.g., 2, 3, 4, 5, 6, 7, 8, 9, 10, 11, 12, 13, 14, 15, 20, 25, 30, 35, 40, 45, 50, 60, 70, 80, 90, 100, 120, 140, 150, 200 or more) oligomeric subunits, wherein each subunit comprises an AI surface protein or a fragment thereof. The oligomeric subunits may be covalently associated via a conserved lysine within a pilin motif. The oligomeric subunits may be covalently associated via an LPXTG motif, preferably, via the threonine amino acid residue.

[0536] AI surface proteins or fragments thereof to be incorporated into the oligomeric, pilus-like structures of the invention will preferably include a pilin motif.

[0537] The oligomeric, pilus like structures may be used alone or in the combinations of the invention. In one embodiment, the invention comprises a GAS Adhesin Island protein in oligomeric form, preferably in a hyperoligomeric form. In one embodiment, the invention comprises a composition comprising one or more GAS Adhesin Island 2 (“GAS AI-2”) proteins and one or more GAS Adhesin Island 1 (“GAS AI-1”), GAS Adhesin Island 3 (“GAS AI-3”), GAS Adhesin Island 4 (“GAS AI-4”) proteins, GAS Adhesin Island 5 (“GAS AI-5”), or GAS Adhesin Island 6 (“GAS AI-6”) proteins, wherein one or more of the Adhesin Island proteins is in the form of an oligomer, preferably in a hyperoligomeric form.

[0538] In addition to the open reading frames encoding the GAS AI-2 proteins, GAS AI-2 may also include a divergently transcribed transcriptional regulator such as rofA (i.e., the transcriptional regulator is located near or adjacent to the AI protein open reading frames, but it transcribed in the opposite direction).

[0539] GAS Adhesin Island 3

[0540] A third adhesin island, “GAS Adhesin Island 3” or “GAS AI-3” has also been identified in several Group A Streptococcus serotypes and isolates. GAS AI-3 comprises a series of approximately seven open reading frames encoding for a collection of amino acid sequences comprising surface proteins and sortases (“GAS AI-3 proteins”). Specifically, GAS AI-3 includes open reading frames encoding for two or more (i.e., 2, 3, 4, 5, 6, or 7) of SpyM3_{—}0098, SpyM3_{—}0099, SpyM3_{—}0100, SpyM3_{—}0101, SpyM3_{—}0102, SpyM3_{—}0103, SpyM3_{—}0104, SPs0100, SPs0101, SPs0102, SPs0103, SPs0104, SPs0105, SPs0106, orf78, orf79, orf80, orf81, orf82, orf83, orf84, spyM18_{—}0126, spyM18_{—}0127, spyM18_{—}0128, spyM18_{—}0129, spyM18_{—}0130, spyM18_{—}0131, spyM18_{—}0132, SpyoM01000156, SpyoM01000155, SpyoM01000154, SpyoM01000153, SpyoM01000152, SpyoM01000151, SpyoM01000150, and SpyoM01000149. In one embodiment, GAS AI-3 includes open reading frames encoding for two or more (i.e., 2, 3, 4, 5, 6, or 7) of SpyM3_{—}0098, SpyM3_{—}0099, SpyM3_{—}0100, SpyM3_{—}0101, SpyM3_{—}0102, SpyM3_{—}0103, and SpyM3_{—}0104. In another embodiment, GAS AI-3 includes open reading frames encoding for two or more (i.e., 2, 3, 4, 5, 6, or 7) of SPs0100, SPs0101, SPs0102, SPs0103, SPs0104, SPs0105, and SPs0106. In a further embodiment, GAS AI-3 includes open reading frames encoding for two or more (i.e., 2, 3, 4, 5, 6, or 7) of orf78, orf79, orf80, orf81, orf82, orf83, and orf84. In yet another embodiment, GAS AI-3 includes open reading frames encoding for two or more (i.e., 2, 3, 4, 5, 6, or 7) of spyM18_{—}0126, spyM18_{—}0127, spyM18_{—}0128, spyM18_{—}0129, spyM18_{—}0130, spyM18_{—}0131, and spyM18_{—}0132. In yet another embodiment, GAS AI-3 includes open reading frames encoding for two or more (i.e., 2, 3, 4, 5, 6, or 7) of SpyoM01000156, SpyoM01000155, SpyoM01000154, SpyoM01000153, SpyoM01000152, SpyoM01000151, SpyoM01000150, and SpyoM01000149.

[0541] Applicants have also identified open reading frames encoding fimbrial structural subunits in other GAS bacteria harbouring an AI-3. These open reading frames encode fimbrial structural subunits ISS3040_fimbrial, ISS3776_fimbrial, and ISS4959_fimbrial. A GAS AI-3 may comprise a polynucleotide encoding any one of ISS3040_fimbrial, ISS3776_fimbrial, and ISS4959_fimbrial.

[0542] One or more of the GAS AI-3 open reading frame polynucleotide sequences may be replaced by a polynucleotide sequence coding for a fragment of the replaced ORF. Alternatively, one or more of the GAS AI-3 open reading frames may be replaced by a sequence having sequence homology to the replaced ORF.

[0543] A preferred immunogenic composition of the invention comprises a GAS AI-3 surface protein which may be formulated or purified in an oligomeric (pilus) form. In a preferred embodiment, the oligomeric form is a hyperoligomer. Another preferred immunogenic composition of the invention comprises a GAS AI-3 surface protein which has been isolated in an oligomeric (pilus) form. The oligomer or hyperoligomeric pilus structures comprising the GAS AI-3 surface proteins may be purified or otherwise formulate for use in immunogenic compositions.

[0544] One or more of the GAS AI-3 surface protein sequences typically include an LPXTG motif (e.g., SEQ ID NO:122) or other sortase substrate motif. The AI surface proteins of the invention may affect the ability of the GAS bacteria to adhere to and invade epithelial cells. AI surface proteins may also affect the ability of GAS to translocate through an epithelial cell layer. Preferably, one or more AI surface proteins are capable of binding to or otherwise associating with an epithelial cell surface. AI surface proteins may also be able to bind to or associate with fibrinogen, fibronectin, or collagen.

[0545] The GAS AI-3 sortase proteins are predicted to be involved in the secretion and anchoring of the LPXTG containing surface proteins. GAS AI-3 may encode for at least one surface protein. Alternatively, GAS AI-3 may encode for at least two surface exposed proteins and at least one sortase. Preferably, GAS AI-3 encodes for at least three surface exposed proteins and at least two sortases.

[0546] The AI surface proteins may be covalently attached to the bacterial cell wall by membrane-associated transpeptidases, such as an AI sortase. The sortase may function to cleave the surface protein, preferably between the threonine and glycine residues of an LPXTG motif. The sortase may then assist in the formation of an amide link between the threonine or alanine carboxyl group and a cell wall precursor such as lipid II. The precursor can then be incorporated into the peptidoglycan via the transglycoslylation and transpeptidation reactions of bacterial wall synthesis. See Comfort et al., Infection & Immunity (2004) 72(5): 2710-2722.

[0547] The invention includes a composition comprising oligomeric, pilus-like structures comprising an AI surface protein such as SpyM3_{—}0098, SpyM3_{—}0100, SpyM3_{—}0102, SpyM3_{—}0104, SPs0100, SPs0102, SPs0104, SPs0106, orf78, orf80, orf82, orf84, spyM18_{—}0126, spyM18_{—}0128, spyM18_{—}0130, spyM18_{—}0132, SpyoM01000155, SpyoM01000153, SpyoM01000151, SpyoM01000149, ISS3040_fimbrial, ISS3776_fimbrial, and ISS4959_fimbrial. In one embodiment, the invention includes a composition comprising oligomeric, pilus-like structures comprising an AI surface protein such as SpyM3_{—}0098, SpyM3_{—}0100, SpyM3_{—}0102, and SpyM3_{—}0104. In another embodiment, the invention includes a composition comprising oligomeric, pilus-like structures comprising an AI surface protein such as SPs0100, SPs0102, SPs0104, and SPs0106. In another embodiment, the invention includes a composition comprising oligomeric, pilus-like structures comprising an AI surface protein such as orf78, orf80, orf82, and orf84. In yet another embodiment, the invention includes a composition comprising oligomeric, pilus-like structures comprising an AI surface protein such as spyM18_{—}0126, spyM18_{—}0128, spyM18_{—}0130, and spyM18_{—}0132. In a further embodiment, the invention includes a composition comprising oligomeric, pilus-like structures comprising an AI surface protein such as SpyoM01000155, SpyoM01000153, SpyoM01000151, and SpyoM01000149. In yet a further embodiment, the invention includes a composition comprising oligomeric, pilus-like structures comprising an AI surface protein such as ISS3040_fimbrial, ISS3776_fimbrial, and ISS4959_fimbrial. The oligomeric, pilus-like structure may comprise numerous units of AI surface protein. Preferably, the oligomeric, pilus-like structures comprise two or more AI surface proteins. Still more preferably, the oligomeric, pilus-like structure comprises a hyper-oligomeric pilus-like structure comprising at least two (e.g., 2, 3, 4, 5, 6, 7, 8, 9, 10, 11, 12, 13, 14, 15, 20, 25, 30, 35, 40, 45, 50, 60, 70, 80, 90, 100, 120, 140, 150, 200 or more) oligomeric subunits, wherein each subunit comprises an AI surface protein or a fragment thereof. The oligomeric subunits may be covalently associated via a conserved lysine within a pilin motif. The oligomeric subunits may be covalently associated via an LPXTG motif, preferably, via the threonine amino acid residue.

[0548] AI surface proteins or fragments thereof to be incorporated into the oligomeric, pilus-like structures of the invention will preferably include a pilin motif.

[0549] The oligomeric, pilus like structures may be used alone or in the combinations of the invention. In one embodiment, the invention comprises a GAS Adhesin Island protein in oligomeric form, preferably in a hyperoligomeric form. In one embodiment, the invention comprises a composition comprising one or more GAS Adhesin Island 3 (“GAS AI-3”) proteins and one or more GAS Adhesin Island 1 (“GAS AI-1”), GAS Adhesin Island 2 (“GAS AI-2”), GAS Adhesin Island 4 (“GAS AI-4”) proteins, GAS Adhesin Island 5 (“GAS AI-5”), or GAS Adhesin Island 6 (“GAS AI-6”) proteins, wherein one or more of the Adhesin Island proteins is in the form of an oligomer, preferably in a hyperoligomeric form.

[0550] In addition to the open reading frames encoding the GAS AI-3 proteins, GAS AI-3 may also include a transcriptional regulator such as Nra.

[0551] GAS Adhesin Island 4

[0552] A fourth adhesin island, “GAS Adhesin Island 4” or “GAS AI-4” has also been identified in Group A Streptococcus serotypes and isolates. GAS AI-4 comprises a series of approximately eight open reading frames encoding for a collection of amino acid sequences comprising surface proteins and sortases (“GAS AI-4 proteins”). Specifically, GAS AI-4 includes open reading frames encoding for two or more (i.e., 2, 3, 4, 5, 6, 7, or 8) of 19224134, 19224135, 19223136, 19223137, 19224138, 19224139, 19224140, and 19224141.

[0553] Applicants have also identified open reading frames encoding fimbrial structural subunits in other GAS bacteria harbouring an AI-4. These open reading frames encode fimbrial structural subunits 20010296_fimbrial, 20020069_fimbrial, CDC SS 635_fimbrial, ISS4883_fimbrial, and ISS4538_fimbrial. A GAS AI-4 may comprise a polynucleotide encoding any one of 20010296_fimbrial, 20020069_fimbrial, CDC SS 635_fimbrial, ISS4883_fimbrial, and ISS4538_fimbrial.

[0554] One or more of the GAS AI-4 open reading frame polynucleotide sequences may be replaced by a polynucleotide sequence coding for a fragment of the replaced ORF. Alternatively, one or more of the GAS AI-4 open reading frames may be replaced by a sequence having sequence homology to the replaced ORF.

[0555] A preferred immunogenic composition of the invention comprises a GAS AI-4 surface protein which may be formulated or purified in an oligomeric (pilus) form. In a preferred embodiment, the oligomeric form is a hyperoligomer. Another preferred immunogenic composition of the invention comprises a GAS AI-4 surface protein which has been isolated in an oligomeric (pilus) form. The oligomer or hyperoligomeric pilus structures comprising the GAS AI-4 surface proteins may be purified or otherwise formulate for use in immunogenic compositions.

[0556] One or more of the GAS AI-4 surface protein sequences typically include an LPXTG motif (e.g., SEQ ID NO:122) or other sortase substrate motif. The AI surface proteins of the invention may effect the ability of the GAS bacteria to adhere to and invade epithelial cells. AI surface proteins may also affect the ability of GAS to translocate through an epithelial cell layer. Preferably, one or more AI surface proteins are capable of binding to or otherwise associating with an epithelial cell surface. AI surface proteins may also be able to bind to or associate with fibrinogen, fibronectin, or collagen.

[0557] The GAS AI-4 sortase proteins are predicted to be involved in the secretion and anchoring of the LPXTG containing surface proteins. GAS AI-4 may encode for at least one surface protein. Alternatively, GAS AI-4 may encode for at least two surface exposed proteins and at least one sortase. Preferably, GAS AI-4 encodes for at least three surface exposed proteins and at least two sortases.

[0558] The AI surface proteins may be covalently attached to the bacterial cell wall by membrane-associated transpeptidases, such as an AI sortase. The sortase may function to cleave the surface protein, preferably between the threonine and glycine residues of an LPXTG motif. The sortase may then assist in the formation of an amide link between the threonine carboxyl group and a cell wall precursor such as lipid II. The precursor can then be incorporated into the peptidoglycan via the transglycoslylation and transpeptidation reactions of bacterial wall synthesis. See Comfort et al., Infection & Immunity (2004) 72(5): 2710-2722.

[0559] In one embodiment, the invention includes a composition comprising oligomeric, pilus-like structures comprising an AI surface protein such as 19224134, 19224135, 19224137, 19224139, 19224141, 20010296_fimbrial, 20020069_fimbrial, CDC SS 635_fimbrial, ISS4883_fimbrial, and ISS4538_fimbrial. The oligomeric, pilus-like structure may comprise numerous units of AI surface protein. Preferably, the oligomeric, pilus-like structures comprise two or more AI surface proteins. Still more preferably, the oligomeric, pilus-like structure comprises a hyper-oligomeric pilus-like structure comprising at least two (e.g., 2, 3, 4, 5, 6, 7, 8, 9, 10, 11, 12, 13, 14, 15, 20, 25, 30, 35, 40, 45, 50, 60, 70, 80, 90, 100, 120, 140, 150, 200 or more) oligomeric subunits, wherein each subunit comprises an AI surface protein or a fragment thereof. The oligomeric subunits may be covalently associated via a conserved lysine within a pilin motif. The oligomeric subunits may be covalently associated via an LPXTG motif, preferably, via the threonine amino acid residue.

[0560] AI surface proteins or fragments thereof to be incorporated into the oligomeric, pilus-like structures of the invention will preferably include a pilin motif.

[0561] The oligomeric, pilus like structures may be used alone or in the combinations of the invention. In one embodiment, the invention comprises a GAS Adhesin Island protein in oligomeric form, preferably in a hyperoligomeric form. In one embodiment, the invention comprises a composition comprising one or more GAS Adhesin Island 4 (“GAS AI-4”) proteins and one or more GAS Adhesin Island 1 (“GAS AI-1”), GAS Adhesin Island 2 (“GAS AI-2”), GAS Adhesin Island 3 (“GAS AI-3”) proteins, GAS Adhesin Island 5 (“GAS AI-5”), or GAS Adhesin Island 6 (“GAS AI-6”) proteins, wherein one or more of the Adhesin Island proteins is in the form of an oligomer, preferably in a hyperoligomeric form.

[0562] In addition to the open reading frames encoding the GAS AI-4 proteins, GAS AI-4 may also include a divergently transcribed transcriptional regulator such as rofA (i.e., the transcriptional regulator is located near or adjacent to the AI protein open reading frames, but it transcribed in the opposite direction).

[0563] GAS Adhesin Island 5

[0564] A fifth adhesin island, “GAS Adhesin Island 5” or “GAS AI-5” has also been identified in Group A Streptococcus serotypes and isolates. GAS AI-5 comprises a series of approximately 10 open reading frames encoding for a collection of amino acid sequences comprising surface proteins and sortases (“GAS AI-5 proteins”). Specifically, GAS AI-5 includes open reading frames encoding for two or more (i.e., 2, 3, 4, 5, 6, 7, 8, 9, or 10) of MGAS10270_Spy0108, MGAS10270_Spy0109, MGAS10270_Spy0110, MGAS10270_Spy0111, MGAS10270_Spy0112, MGAS10270_Spy0113, MGAS10270_Spy0114, MGAS10270_Spy0115, MGAS10270_Spy0116, and MGAS10270_Spy0117.

[0565] One or more of the GAS AI-5 open reading frame polynucleotide sequences may be replaced by a polynucleotide sequence coding for a fragment of the replaced ORF. Alternatively, one or more of the GAS AI-5 open reading frames may be replaced by a sequence having sequence homology to the replaced ORF.

[0566] A preferred immunogenic composition of the invention comprises a GAS AI-5 surface protein which may be formulated or purified in an oligomeric (pilus) form. In a preferred embodiment, the oligomeric form is a hyperoligomer. Another preferred immunogenic composition of the invention comprises a GAS AI-5 surface protein which has been isolated in an oligomeric (pilus) form. The oligomer or hyperoligomeric pilus structures comprising the GAS AI-5 surface proteins may be purified or otherwise formulate for use in immunogenic compositions.

[0567] One or more of the GAS AI-5 surface protein sequences typically include an LPXTG motif (such as IPxTG (SEQ ID NO:133) or FPxTG (SEQ ID NO:141) or other sortase substrate motif. The AI surface proteins of the invention may effect the ability of the GAS bacteria to adhere to and invade epithelial cells. AI surface proteins may also affect the ability of GAS to translocate through an epithelial cell layer. Preferably, one or more AI surface proteins are capable of binding to or otherwise associating with an epithelial cell surface. AI surface proteins may also be able to bind to or associate with fibrinogen, fibronectin, or collagen.

[0568] The GAS AI-5 sortase proteins are predicted to be involved in the secretion and anchoring of the LPXTG containing surface proteins. GAS AI-5 may encode for at least one surface protein. Alternatively, GAS AI-5 may encode for at least two surface exposed proteins and at least one sortase. Preferably, GAS AI-5 encodes for at least three surface exposed proteins and at least two sortases.

[0569] The AI surface proteins may be covalently attached to the bacterial cell wall by membrane-associated transpeptidases, such as an AI sortase. The sortase may function to cleave the surface protein, preferably between the threonine and glycine residues of an LPXTG motif. The sortase may then assist in the formation of an amide link between the threonine carboxyl group and a cell wall precursor such as lipid II. The precursor can then be incorporated into the peptidoglycan via the transglycoslylation and transpeptidation reactions of bacterial wall synthesis. See Comfort et al., Infection & Immunity (2004) 72(5): 2710-2722.

[0570] In one embodiment, the invention includes a composition comprising oligomeric, pilus-like structures comprising an AI surface protein such as MGAS10270_Spy0108, MGAS10270_Spy0109, MGAS10270_Spy0110, MGAS10270_Spy0111, MGAS10270_Spy0112, MGAS10270_Spy0113, MGAS10270_Spy0114, MGAS10270_Spy0115, MGAS10270_Spy0116, and MGAS10270_Spy0117. The oligomeric, pilus-like structure may comprise numerous units of AI surface protein. Preferably, the oligomeric, pilus-like structures comprise two or more AI surface proteins. Still more preferably, the oligomeric, pilus-like structure comprises a hyper-oligomeric pilus-like structure comprising at least two (e.g., 2, 3, 4, 5, 6, 7, 8, 9, 10, 11, 12, 13, 14, 15, 20, 25, 30, 35, 40, 45, 50, 60, 70, 80, 90, 100, 120, 140, 150, 200 or more) oligomeric subunits, wherein each subunit comprises an AI surface protein or a fragment thereof. The oligomeric subunits may be covalently associated via a conserved lysine within a pilin motif. The oligomeric subunits may be covalently associated via an LPXTG motif, preferably, via the threonine amino acid residue.

[0571] AI surface proteins or fragments thereof to be incorporated into the oligomeric, pilus-like structures of the invention will preferably include a pilin motif.

[0572] The oligomeric, pilus like structures may be used alone or in the combinations of the invention. In one embodiment, the invention comprises a GAS Adhesin Island protein in oligomeric form, preferably in a hyperoligomeric form. In one embodiment, the invention comprises a composition comprising one or more GAS Adhesin Island 5 (“GAS AI-5”) proteins and one or more GAS Adhesin Island 1 (“GAS AI-1”), GAS Adhesin Island 2 (“GAS AI-2”), GAS Adhesin Island 3 (“GAS AI-3”), GAS Adhesin Island 4 (“GAS AI-4”), or GAS Adhesin Island 6 (“GAS AI-6”) proteins, wherein one or more of the Adhesin Island proteins is in the form of an oligomer, preferably in a hyperoligomeric form.

[0573] In addition to the open reading frames encoding the GAS AI-5 proteins, GAS AI-5 may also include a divergently transcribed transcriptional regulator such as rofA (i.e., the transcriptional regulator is located near or adjacent to the AI protein open reading frames, but it transcribed in the opposite direction).

TABLE 54
AI-5 proteins in M2 (10270)

| | | amino | Entrez | Entrez | | LPXTG |
|---|---|---|---|---|---|---|
| identification | strand | acids | protein | gene | ORF | motif |
| 33 kDa chaperonin | − | 290 | 94989616 | 4063967 | MGAS10270_Spy0107 | |
| Transcriptional regulator | − | 530 | 94989617 | 4063968 | MGAS10270_Spy0108 | |
| RofA | | | | | | |
| hypothetical protein | + | 578 | 94989618 | 4063969 | MGAS10270_Spy0109 | IPxTG |
| MGAS10270_Spy0109 | | | | | | |
| hypothetical protein | + | 307 | 94989619 | 4063970 | MGAS10270_Spy0110 | IPxTG |
| MGAS10270_Spy0110 | | | | | | |
| Sortase | + | 305 | 94989620 | 4063971 | MGAS10270_Spy0111 | |
| Sortase | + | 283 | 94989621 | 4063972 | MGAS10270_Spy0112 | |
| Collagen adhesion protein | + | 890 | 94989622 | 4063973 | MGAS10270_Spy0113 | FPxTG |
| hypothetical protein | + | 53 | 94989623 | 4063974 | MGAS10270_Spy0114 | |
| MGAS10270_Spy0114 | | | | | | |
| Sortase | + | 111 | 94989624 | 4063975 | MGAS10270_Spy0115 | |
| Sortase | + | 285 | 94989625 | 4063091 | MGAS10270_Spy0116 | |
| Fibronectin-binding | + | 1715 | 94989626 | 4063092 | MGAS10270_Spy0117 | LPxTG |
| protein | | | | | | |
| hypothetical protein | − | 221 | 94989627 | 4063093 | MGAS10270_Spy0118 | |
| MGAS10270_Spy0118 | | | | | | |

[0574] GAS Adhesin Island 6

[0575] A sixth adhesin island, “GAS Adhesin Island 6” or “GAS AI-6” has also been identified in Group A Streptococcus serotypes and isolates. GAS AI-6 comprises a series of approximately 10 open reading frames encoding for a collection of amino acid sequences comprising surface proteins and sortases (“GAS AI-6 proteins”). Specifically, GAS AI-6 includes open reading frames encoding for two or more (i.e., 2, 3, 4, 5, 6, 7, or 8) of MGAS10750_Spy0113, MGAS10750_Spy0114, MGAS10750_Spy0115, MGAS10750_Spy0116, MGAS10750_Spy0117, MGAS10750_Spy0118, MGAS10750_Spy0119, and MGAS10750_Spy0120.

[0576] One or more of the GAS AI-6 open reading frame polynucleotide sequences may be replaced by a polynucleotide sequence coding for a fragment of the replaced ORF. Alternatively, one or more of the GAS AI-6 open reading frames may be replaced by a sequence having sequence homology to the replaced ORF.

[0577] A preferred immunogenic composition of the invention comprises a GAS AI-6 surface protein which may be formulated or purified in an oligomeric (pilus) form. In a preferred embodiment, the oligomeric form is a hyperoligomer. Another preferred immunogenic composition of the invention comprises a GAS AI-6 surface protein which has been isolated in an oligomeric (pilus) form. The oligomer or hyperoligomeric pilus structures comprising the GAS AI-6 surface proteins may be purified or otherwise formulate for use in immunogenic compositions.

[0578] One or more of the GAS AI-6 surface protein sequences typically include an LPXTG motif (such as LPXTG (SEQ ID NO:122), IPxTG (SEQ ID NO:133) or FPxTG (SEQ ID NO:141) or other sortase substrate motif. The AI surface proteins of the invention may effect the ability of the GAS bacteria to adhere to and invade epithelial cells. AI surface proteins may also affect the ability of GAS to translocate through an epithelial cell layer. Preferably, one or more AI surface proteins are capable of binding to or otherwise associating with an epithelial cell surface. AI surface proteins may also be able to bind to or associate with fibrinogen, fibronectin, or collagen.

[0579] The GAS AI-6 sortase proteins are predicted to be involved in the secretion and anchoring of the LPXTG containing surface proteins. GAS AI-6 may encode for at least one surface protein. Alternatively, GAS AI-6 may encode for at least two surface exposed proteins and at least one sortase. Preferably, GAS AI-6 encodes for at least three surface exposed proteins and at least two sortases.

[0580] The AI surface proteins may be covalently attached to the bacterial cell wall by membrane-associated transpeptidases, such as an AI sortase. The sortase may function to cleave the surface protein, preferably between the threonine and glycine residues of an LPXTG motif. The sortase may then assist in the formation of an amide link between the threonine carboxyl group and a cell wall precursor such as lipid II. The precursor can then be incorporated into the peptidoglycan via the transglycoslylation and transpeptidation reactions of bacterial wall synthesis. See Comfort et al., Infection & Immunity (2004) 72(5): 2710-2722.

[0581] In one embodiment, the invention includes a composition comprising oligomeric, pilus-like structures comprising an AI surface protein such as MGAS10750_Spy0113, MGAS10750_Spy0114, MGAS10750_Spy0115, MGAS10750_Spy0116, MGAS10750_Spy0117, MGAS10750_Spy0118, MGAS10750_Spy0119, and MGAS10750_Spy0120. The oligomeric, pilus-like structure may comprise numerous units of AI surface protein. Preferably, the oligomeric, pilus-like structures comprise two or more AI surface proteins. Still more preferably, the oligomeric, pilus-like structure comprises a hyper-oligomeric pilus-like structure comprising at least two (e.g., 2, 3, 4, 5, 6, 7, 8, 9, 10, 11, 12, 13, 14, 15, 20, 25, 30, 35, 40, 45, 50, 60, 70, 80, 90, 100, 120, 140, 150, 200 or more) oligomeric subunits, wherein each subunit comprises an AI surface protein or a fragment thereof. The oligomeric subunits may be covalently associated via a conserved lysine within a pilin motif. The oligomeric subunits may be covalently associated via an LPXTG motif, preferably, via the threonine amino acid residue.

[0582] AI surface proteins or fragments thereof to be incorporated into the oligomeric, pilus-like structures of the invention will preferably include a pilin motif.

[0583] The oligomeric, pilus like structures may be used alone or in the combinations of the invention. In one embodiment, the invention comprises a GAS Adhesin Island protein in oligomeric form, preferably in a hyperoligomeric form. In one embodiment, the invention comprises a composition comprising one or more GAS Adhesin Island 6 (“GAS AI-6”) proteins and one or more GAS Adhesin Island 1 (“GAS AI-1”), GAS Adhesin Island 2 (“GAS AI-2”), GAS Adhesin Island 3 (“GAS AI-3”), GAS Adhesin Island 4 (“GAS AI-4”), or GAS Adhesin Island 5 (“GAS AI-5”) proteins, wherein one or more of the Adhesin Island proteins is in the form of an oligomer, preferably in a hyperoligomeric form.

[0584] In addition to the open reading frames encoding the GAS AI-6 proteins, GAS AI-6 may also include a divergently transcribed transcriptional regulator such as rofA (i.e., the transcriptional regulator is located near or adjacent to the AI protein open reading frames, but it transcribed in the opposite direction).

TABLE 55
AI-6 proteins in M4 (10750)

| | | amino | Entrez | Entrez | | sortase |
|---|---|---|---|---|---|---|
| identification | strand | acids | protein | gene | ORF | motif |
| 33 kDa chaperonin | − | 290 | 94993508 | 4067252 | MGAS10750_Spy0112 | |
| Transcriptional regulator | − | 530 | 94993509 | 4067253 | MGAS10750_Spy0113 | |
| RofA | | | | | | |
| Fibronectin-binding | + | 539 | 94993510 | 4067254 | MGAS10750_Spy0114 | LPxTG |
| protein | | | | | | |
| Fibronectin-binding | + | 1367 | 94993511 | 4067255 | MGAS10750_Spy0115 | FPxTG |
| protein | | | | | | |
| Cell wall surface anchor | + | 720 | 94993512 | 4067256 | MGAS10750_Spy0116 | IPxTG |
| family protein | | | | | | |
| Cell wall surface anchor | + | 281 | 94993513 | 4067257 | MGAS10750_Spy0117 | IPxTG |
| family protein | | | | | | |
| Sortase | + | 290 | 94993514 | 4066578 | MGAS10750_Spy0118 | |
| Sortase | + | 277 | 94993515 | 4066579 | MGAS10750_Spy0119 | |
| Sortase | + | 238 | 94993516 | 4066580 | MGAS10750_Spy0120 | |
| hypothetical protein | − | 219 | 94993517 | 4066581 | MGAS10750_Spy0121 | |
| MGAS10750_Spy0121 | | | | | | |

[0585] The oligomeric, pilus-like structures of the invention may be combined with one or more additional GAS proteins. In one embodiment, the oligomeric, pilus-like structures comprise one or more AI surface proteins in combination with a second GAS protein.

[0586] The oligomeric, pilus-like structures may be isolated or purified from bacterial cultures in which the bacteria express an AI surface protein. The invention therefore includes a method for manufacturing an oligomeric AI surface antigen comprising culturing a GAS bacterium that expresses the oligomeric AI protein and isolating the expressed oligomeric AI protein from the GAS bacteria. The AI protein may be collected from secretions into the supernatant or it may be purified from the bacterial surface. The method may further comprise purification of the expressed AI protein. Preferably, the AI protein is in a hyperoligomeric form.

[0587] The oligomeric, pilus-like structures may be isolated or purified from bacterial cultures overexpressing an AI surface protein. The invention therefore includes a method for manufacturing an oligomeric Adhesin Island surface antigen comprising culturing a GAS bacterium adapted for increased AI protein expression and isolation of the expressed oligomeric Adhesin Island protein from the GAS bacteria. The AI protein may be collected from secretions into the supernatant or it may be purified from the bacterial surface. The method may further comprise purification of the expressed Adhesin Island protein. Preferably, the Adhesin Island protein is in a hyperoligomeric form.

[0588] The GAS bacteria are preferably adapted to increase AI protein expression by at least two (e.g., 2, 3, 4, 5, 8, 10, 15, 20, 25, 30, 35, 40, 45, 50, 60, 70, 80, 90, 100, 125, 150 or 200) times wild type expression levels.

[0589] GAS bacteria may be adapted to increase AI protein expression by any means known in the art, including methods of increasing gene dosage and methods of gene upregulation. Such means include, for example, transformation of the GAS bacteria with a plasmid encoding the AI protein. The plasmid may include a strong promoter or it may include multiple copies of the sequence encoding the AI protein. Optionally, the sequence encoding the AI protein within the GAS bacterial genome may be deleted. Alternatively, or in addition, the promoter regulating the GAS Adhesin Island may be modified to increase expression.

[0590] The invention further includes GAS bacteria which have been adapted to produce increased levels of AI surface protein. In particular, the invention includes GAS bacteria which have been adapted to produce oligomeric or hyperoligomeric AI surface protein. In one embodiment, the Gram positive bacteria of the invention are inactivated or attenuated to permit in vivo delivery of the whole bacteria, with the AI surface protein exposed on its surface.

[0591] The invention further includes GAS bacteria which have been adapted to have increased levels of expressed AI protein incorporated in pili on their surface. The GAS bacteria may be adapted to have increased exposure of oligomeric or hyperoligomeric AI proteins on its surface by increasing expression levels of LepA polypeptide, or an equivalent signal peptidase, in the GAS bacteria. Applicants have shown that deletion of LepA in strain SF370 bacteria, which harbour a GAS AI-2, abolishes surface exposure of M and pili proteins on the GAS. Increased levels of LepA expression in GAS are expected to result in increased exposure of M and pili proteins on the surface of GAS. Increased expression of LepA in GAS may be achieved by any means known in the art, such as increasing gene dosage and methods of gene upregulation. The GAS bacteria adapted to have increased levels of LepA expression may additionally be adapted to express increased levels of at least one pili protein.

[0592] Alternatively, the AI proteins of the invention may be expressed on the surface of a non-pathogenic Gram positive bacteria, such as Streptococcus gordonii (See, e.g., Byrd et al., “Biological consequences of antigen and cytokine co-expression by recombinant Streptococcus gordonii vaccine vectors,” Vaccine (2002) 20:2197-2205) or Lactococcus lactis (See, e.g., Mannam et al., “Mucosal Vaccine Made from Live, Recombinant Lactococcus lactis Protects Mice against Pharyngeal Infection with Streptococcus pyogenes” Infection and Immunity (2004) 72(6):3444-3450). As used herein, non-pathogenic Gram positive bacteria refer to Gram positive bacteria which are compatible with a human host subject and are not associated with human pathogenesis. Preferably, the non-pathogenic bacteria are modified to express the AI surface protein in oligomeric, or hyper-oligomeric form. Sequences encoding for an AI surface protein and, optionally, an AI sortase, may be integrated into the non-pathogenic Gram positive bacterial genome or inserted into a plasmid. The non-pathogenic Gram positive bacteria may be inactivated or attenuated to facilitate in vivo delivery of the whole bacteria, with the AI surface protein exposed on its surface. Alternatively, the AI surface protein may be isolated or purified from a bacterial culture of the non-pathogenic Gram positive bacteria. For example, the AI surface protein may be isolated from cell extracts or culture supernatants. Alternatively, the AI surface protein may be isolated or purified from the surface of the non-pathogenic Gram positive bacteria.

[0593] The non-pathogenic Gram positive bacteria may be used to express any of the GAS Adhesin Island proteins described herein. The non-pathogenic Gram positive bacteria are transformed to express an Adhesin Island surface protein. Preferably, the non-pathogenic Gram positive bacteria also express at least one Adhesin Island sortase. The AI transformed non-pathogenic Gram positive bacteria of the invention may be used to prevent or treat infection with pathogenic GAS.

[0594] Applicants modified L. lactis to demonstrate that, like GBS polypeptides, it can express GAS AI polypeptides. L. lactis was transformed with pAM401 constructs encoding entire pili gene clusters of AI-1, AI-2, and AI-4 adhesin islands. Briefly, the pAM401 is a promoterless high-copy plasmid. The entire pili gene clusters of an M6 (AI-1), M1 (AI-2), and M12 (AI-4) bacteria were inserted into the pAM401 construct. The gene clusters were transcribed under the control their own (M6, M1, or M12) promoter or the GBS promoter that successfully initiated expression of the GBS AI-1 adhesin islands in L. lactis, described above. FIG. 172 provides a schematic depiction of GAS M6 (AI-1), M1 (AI-2), and M12 (AI-4) adhesin islands and indicates the portions of the adhesin island sequences inserted in the pAM401 construct.

[0595] Each of the L. lactis transformed with one of the M6, M1, or M12 adhesin island gene clusters expressed high molecular weight structures that were immunoreactive with antibodies that bind to polypeptides present in their respective pili. FIGS. 173A-C provide results of Western blot analysis of surface protein-enriched extracts of L. lactis transformed with M6 (FIG. 173A), M1 (FIG. 173B), or M12 (FIG. 173C) adhesin island gene clusters using antibodies that bind to the fimbrial structural subunit encoded by each cluster. FIG. 173A at lanes 3 and 4 shows detection of high molecular structures in L. lactis transformed with an adhesin island pilus gene cluster from an M1 AI-2 using an antibody that binds to fimbrial structural subunit Spy0128. FIG. 173B at lanes 3 and 4 shows detection of high molecular weight structures in L. lactis transformed with an adhesin island pilus gene cluster from an M12 AI-4 using an antibody that binds to fimbrial structural subunit EftLSL.A. FIG. 173C at lane 3 shows detection of high molecular weight structures in L. lactis transformed with an adhesin island pilus gene cluster from an M6 AI-1 using an antibody that binds to fimbrial structural subunit M6_Spy0160. In FIGS. 173A-C, “p1” immediately following the notation of AI subtype indicates that the promoter present in the Adhesin Island is used to drive transcription of the adhesin island gene cluster and “p2” indicates that the promoter was the GBS promoter described above. Thus, it appears that L. lactis is capable of expressing the fimbrial structural subunits encoded by GAS adhesin islands in an oligomeric form.

[0596] Alternatively, the oligomeric, pilus-like structures may be produced recombinantly. If produced in a recombinant host cell system, the AI surface protein will preferably be expressed in coordination with the expression of one or more of the AI sortases of the invention. Such AI sortases will facilitate oligomeric or hyperoligomeric formation of the AI surface protein subunits.

S. pneumoniae from TIGR4 Adhesin Island

[0597] As discussed above, Applicants have identified adhesin islands within the genome of S. pneumoniae from TIGR4. The S. pneumoniae from TIGR4 Adhesin Island comprises a series of approximately seven open reading frames encoding for a collection of amino acid sequences comprising surface proteins and sortases. Specifically, the S. pneumoniae from TIGR4 AI proteins includes open reading frames encoding for two or more (i.e., 2, 3, 4, 5, 6, or 7) of SPO462, SPO463, SPO464, SPO465, SPO466, SPO467, and SPO468.

[0598] A preferred immunogenic composition of the invention comprises a S. pneumoniae from TIGR4 AI surface protein which may be formulated or purified in an oligomeric (pilus) form. In a preferred embodiment, the oligomeric form is a hyperoligomer. Another preferred immunogenic composition of the invention comprises a S. pneumoniae from TIGR4 AI surface protein which has been isolated in an oligomeric (pilus) form. The oligomer or hyperoligomer pilus structures comprising S. pneumoniae surface proteins may be purified or otherwise formulated for use in immunogenic compositions.

[0599] One or more of the S. pneumoniae from TIGR4 AI open reading frame polynucleotide sequences may be replaced by a polynucleotide sequence coding for a fragment of the replaced ORF. Alternatively, one or more of the S. pneumoniae from TIGR4 AI open reading frames may be replaced by a sequence having sequence homology to the replaced ORF.

[0600] One or more of the S. pneumoniae from TIGR4 AI surface protein sequences typically include an LPXTG motif (e.g., SEQ ID NO:122) or other sortase substrate motif.

[0601] The S. pneumoniae from TIGR4 AI surface proteins of the invention may affect the ability of the S. pneumoniae bacteria to adhere to and invade epithelial cells. AI surface proteins may also affect the ability of S. pneumoniae to translocate through an epithelial cell layer. Preferably, one or more S. pneumoniae from TIGR4 AI surface proteins are capable of binding to or otherwise associating with an epithelial cell surface. S. pneumoniae from TIGR4 AI surface proteins may also be able to bind to or associate with fibrinogen, fibronectin, or collagen.

[0602] The S. pneumoniae from TIGR4 AI sortase proteins are predicted to be involved in the secretion and anchoring of the LPXTG containing surface proteins. S. pneumoniae from TIGR4 AI may encode for at least one surface protein. Alternatively, S. pneumoniae from TIGR4 AI may encode for at least two surface exposed proteins and at least one sortase. Preferably, S. pneumoniae from TIGR4 AI encodes for at least three surface exposed proteins and at least two sortases.

[0603] The AI surface proteins may be covalently attached to the bacterial cell wall by membrane-associated transpeptidases, such as an AI sortase. The sortase may function to cleave the surface protein, preferably between the threonine and glycine residues of an LPXTG motif. The sortase may then assist in the formation of an amide link between the threonine carboxyl group and a cell wall precursor such as lipid II. The precursor can then be incorporated into the peptidoglycan via the transglycoslylation and transpeptidation reactions of bacterial wall synthesis. See Comfort et al., Infection & Immunity (2004) 72(5): 2710-2722.

[0604] In one embodiment, the invention includes a composition comprising oligomeric, pilus-like structures comprising a S. pneumoniae from TIGR4 AI surface protein such as SPO462, SPO463, SPO464, or SPO465. The oligomeric, pilus-like structure may comprise numerous units of AI surface protein. Preferably, the oligomeric, pilus-like structures comprise two or more AI surface proteins. Still more preferably, the oligomeric, pilus-like structure comprises a hyper-oligomeric pilus-like structure comprising at least two (e.g., 2, 3, 4, 5, 6, 7, 8, 9, 10, 11, 12, 13, 14, 15, 20, 25, 30, 35, 40, 45, 50, 60, 70, 80, 90, 100, 120, 140, 150, 200 or more) oligomeric subunits, wherein each subunit comprises an AI surface protein or a fragment thereof. The oligomeric subunits may be covalently associated via a conserved lysine within a pilin motif. The oligomeric subunits may be covalently associated via an LPXTG motif, preferably, via the threonine or serine amino acid residue, respectively.

[0605] AI surface proteins or fragments thereof to be incorporated into the oligomeric, pilus-like structures of the invention will preferably include a pilin motif.

[0606] The oligomeric, pilus like structures may be used alone or in the combinations of the invention. In one embodiment, the invention comprises a S. pneumoniae from TIGR4 AI protein in oligomeric form, preferably in a hyperoligomeric form. In one embodiment, the invention comprises a composition comprising one or more S. pneumoniae from TIGR4 AI proteins and one or more S. pneumoniae strain 670 AI proteins, wherein one or more of the S. pneumoniae AI proteins is in the form of an oligomer, preferably in a hyperoligomeric form.

[0607] In addition to the open reading frames encoding the S. pneumoniae from TIGR4 AI proteins, S. pneumoniae from TIGR4 AI may also include a transcriptional regulator.

S. pneumoniae Strain 670 Adhesin Island

[0608] As discussed above, Applicants have identified adhesin islands within the genome of S. pneumoniae strain 670. The S. pneumoniae strain 670 Adhesin Island comprises a series of approximately seven open reading frames encoding for a collection of amino acid sequences comprising surface proteins and sortases. Specifically, the S. pneumoniae strain 670 AI proteins includes open reading frames encoding for two or more (i.e., 2, 3, 4, 5, 6, or 7) of orf1_{—}670, orf3_{—}670, orf4_{—}670, orf5_{—}670, orf6_{—}670, orf7_{—}670, orf8_{—}670.

[0609] A preferred immunogenic composition of the invention comprises a S. pneumoniae strain 670 AI surface protein which may be formulated or purified in an oligomeric (pilus) form. Another preferred immunogenic composition of the invention comprises a S. pneumoniae strain 670 AI surface protein which has been isolated in an oligomeric (pilus) form.

[0610] One or more of the S. pneumoniae strain 670 AI open reading frame polynucleotide sequences may be replaced by a polynucleotide sequence coding for a fragment of the replaced ORF. Alternatively, one or more of the S. pneumoniae strain 670 AI open reading frames may be replaced by a sequence having sequence homology to the replaced ORF.

[0611] One or more of the S. pneumoniae strain 670 AI surface protein sequences typically include an LPXTG motif (e.g., SEQ ID NO:122) or other sortase substrate motif.

[0612] The S. pneumoniae strain 670 AI surface proteins of the invention may affect the ability of the S. pneumoniae bacteria to adhere to and invade epithelial cells. AI surface proteins may also affect the ability of S. pneumoniae to translocate through an epithelial cell layer. Preferably, one or more S. pneumoniae strain 670 AI surface proteins are capable of binding to or otherwise associating with an epithelial cell surface. S. pneumoniae strain 670 AI surface proteins may also be able to bind to or associate with fibrinogen, fibronectin, or collagen.

[0613] The S. pneumoniae strain 670 AI sortase proteins are predicted to be involved in the secretion and anchoring of the LPXTG containing surface proteins. S. pneumoniae strain 670 AI may encode for at least one surface protein. Alternatively, S. pneumoniae strain 670 AI may encode for at least two surface exposed proteins and at least one sortase. Preferably, S. pneumoniae strain 670 AI encodes for at least three surface exposed proteins and at least two sortases.

[0614] The AI surface proteins may be covalently attached to the bacterial cell wall by membrane-associated transpeptidases, such as an AI sortase. The sortase may function to cleave the surface protein, preferably between the threonine and glycine residues of an LPXTG motif. The sortase may then assist in the formation of an amide link between the threonine carboxyl group and a cell wall precursor such as lipid II. The precursor can then be incorporated into the peptidoglycan via the transglycoslylation and transpeptidation reactions of bacterial wall synthesis. See Comfort et al., Infection & Immunity (2004) 72(5): 2710-2722.

[0615] In one embodiment, the invention includes a composition comprising oligomeric, pilus-like structures comprising a S. pneumoniae strain 670 AI surface protein such as orf3_{—}670, orf4_{—}670, or orf5_{—}670. The oligomeric, pilus-like structure may comprise numerous units of AI surface protein. Preferably, the oligomeric, pilus-like structures comprise two or more AI surface proteins. Still more preferably, the oligomeric, pilus-like structure comprises a hyper-oligomeric pilus-like structure comprising at least two (e.g., 2, 3, 4, 5, 6, 7, 8, 9, 10, 11, 12, 13, 14, 15, 20, 25, 30, 35, 40, 45, 50, 60, 70, 80, 90, 100, 120, 140, 150, 200 or more) oligomeric subunits, wherein each subunit comprises an AI surface protein or a fragment thereof. The oligomeric subunits may be covalently associated via a conserved lysine within a pilin motif. The oligomeric subunits may be covalently associated via an LPXTG motif, preferably, via the threonine or serine amino acid residue, respectively.

[0616] AI surface proteins or fragments thereof to be incorporated into the oligomeric, pilus-like structures of the invention will preferably include a pilin motif.

[0617] The oligomeric, pilus like structures may be used alone or in the combinations of the invention. In one embodiment, the invention comprises a S. pneumoniae strain 670 AI protein in oligomeric form, preferably in a hyperoligomeric form. In one embodiment, the invention comprises a composition comprising one or more S. pneumoniae strain 670 AI proteins and one or more S. pneumoniae from TIGR4 AI proteins, wherein one or more of the S. pneumoniae AI proteins is in the form of an oligomer, preferably in a hyperoligomeric form.

[0618] In addition to the open reading frames encoding the S. pneumoniae strain 670 AI proteins, S. pneumoniae strain 670 AI may also include a transcriptional regulator.

S. pneumoniae Strain 14 CSR 10 Adhesin Island

[0619] As discussed above, Applicants have identified adhesin islands within the genome of S. pneumoniae strain 14 CSR 10. The S. pneumoniae strain 14 CSR 10 Adhesin Island comprises a series of approximately seven open reading frames encoding for a collection of amino acid sequences comprising surface proteins and sortases. Specifically, the S. pneumoniae strain 14 CSR 10 AI proteins includes open reading frames encoding for two or more (i.e., 2, 3, 4, 5, 6, or 7) of ORF2_{—}14CSR, ORF3_{—}14CSR, ORF4_{—}14CSR, ORF5_{—}14CSR, ORF6_{—}14CSR, ORF7_{—}14CSR, ORF8_{—}14CSR.

[0620] A preferred immunogenic composition of the invention comprises a S. pneumoniae strain 14 CSR 10 AI surface protein which may be formulated or purified in an oligomeric (pilus) form. Another preferred immunogenic composition of the invention comprises a S. pneumoniae strain 14 CSR 10 AI surface protein which has been isolated in an oligomeric (pilus) form.

[0621] One or more of the S. pneumoniae strain 14 CSR 10 AI open reading frame polynucleotide sequences may be replaced by a polynucleotide sequence coding for a fragment of the replaced ORF. Alternatively, one or more of the S. pneumoniae strain 14 CSR 10 AI open reading frames may be replaced by a sequence having sequence homology to the replaced ORF.

[0622] One or more of the S. pneumoniae strain 14 CSR 10 AI surface protein sequences typically include an LPXTG motif (e.g., SEQ ID NO:122) or other sortase substrate motif.

[0623] The S. pneumoniae strain 14 CSR 10 AI surface proteins of the invention may affect the ability of the S. pneumoniae bacteria to adhere to and invade epithelial cells. AI surface proteins may also affect the ability of S. pneumoniae to translocate through an epithelial cell layer. Preferably, one or more S. pneumoniae strain 14 CSR 10 AI surface proteins are capable of binding to or otherwise associating with an epithelial cell surface. S. pneumoniae strain 14 CSR 10 AI surface proteins may also be able to bind to or associate with fibrinogen, fibronectin, or collagen.

[0624] The S. pneumoniae strain 14 CSR 10 AI sortase proteins are predicted to be involved in the secretion and anchoring of the LPXTG containing surface proteins. S. pneumoniae strain 14 CSR 10 AI may encode for at least one surface protein. Alternatively, S. pneumoniae strain 14 CSR 10 AI may encode for at least two surface exposed proteins and at least one sortase. Preferably, S. pneumoniae strain 14 CSR 10 AI encodes for at least three surface exposed proteins and at least two sortases.

[0625] The AI surface proteins may be covalently attached to the bacterial cell wall by membrane-associated transpeptidases, such as an AI sortase. The sortase may function to cleave the surface protein, preferably between the threonine and glycine residues of an LPXTG motif. The sortase may then assist in the formation of an amide link between the threonine carboxyl group and a cell wall precursor such as lipid II. The precursor can then be incorporated into the peptidoglycan via the transglycoslylation and transpeptidation reactions of bacterial wall synthesis. See Comfort et al., Infection & Immunity (2004) 72(5): 2710-2722.

[0626] In one embodiment, the invention includes a composition comprising oligomeric, pilus-like structures comprising a S. pneumoniae strain 14 CSR 10 AI surface protein such as orf3_CSR, orf4_CSR, or orf5_CSR. The oligomeric, pilus-like structure may comprise numerous units of AI surface protein. Preferably, the oligomeric, pilus-like structures comprise two or more AI surface proteins. Still more preferably, the oligomeric, pilus-like structure comprises a hyper-oligomeric pilus-like structure comprising at least two (e.g., 2, 3, 4, 5, 6, 7, 8, 9, 10, 11, 12, 13, 14, 15, 20, 25, 30, 35, 40, 45, 50, 60, 70, 80, 90, 100, 120, 140, 150, 200 or more) oligomeric subunits, wherein each subunit comprises an AI surface protein or a fragment thereof. The oligomeric subunits may be covalently associated via a conserved lysine within a pilin motif. The oligomeric subunits may be covalently associated via an LPXTG motif, preferably, via the threonine or serine amino acid residue, respectively.

[0627] AI surface proteins or fragments thereof to be incorporated into the oligomeric, pilus-like structures of the invention will preferably include a pilin motif.

[0628] The oligomeric, pilus like structures may be used alone or in the combinations of the invention. In one embodiment, the invention comprises a S. pneumoniae strain 14 CSR 10 AI protein in oligomeric form, preferably in a hyperoligomeric form. In one embodiment, the invention comprises a composition comprising one or more S. pneumoniae strain 14 CSR 10 AI proteins, and one or more AI proteins of any of S. pneumoniae from TIGR4, 670, 19A Hungary 6, 6B Finland 12, 6B Spain 2, 9V Spain 3, 19F Taiwan 14, 23F Taiwan 15, or 23F Poland 16, wherein one or more of the S. pneumoniae AI proteins is in the form of an oligomer, preferably in a hyperoligomeric form.

[0629] In addition to the open reading frames encoding the S. pneumoniae strain 14 CSR 10AI proteins, S. pneumoniae strain 14 CSR 10 AI may also include a transcriptional regulator.

S. pneumoniae Strain 19A Hungary 6 Adhesin Island

[0630] As discussed above, Applicants have identified adhesin islands within the genome of S. pneumoniae strain 19A Hungary 6. The S. pneumoniae strain 19A Hungary 6 Adhesin Island comprises a series of approximately seven open reading frames encoding for a collection of amino acid sequences comprising surface proteins and sortases. Specifically, the S. pneumoniae strain 19A Hungary 6 AI proteins includes open reading frames encoding for two or more (i.e., 2, 3, 4, 5, 6, or 7) of ORF2_{—}19AH, ORF3_{—}19AH, ORF4_{—}19AH, ORF5_{—}19AH, ORF6_{—}19AH, ORF7_{—}19AH, ORF8_{—}19AH.

[0631] A preferred immunogenic composition of the invention comprises a S. pneumoniae strain 19A Hungary 6 AI surface protein which may be formulated or purified in an oligomeric (pilus) form. Another preferred immunogenic composition of the invention comprises a S. pneumoniae strain 19A Hungary 6 AI surface protein which has been isolated in an oligomeric (pilus) form.

[0632] One or more of the S. pneumoniae strain 19A Hungary 6 AI open reading frame polynucleotide sequences may be replaced by a polynucleotide sequence coding for a fragment of the replaced ORF. Alternatively, one or more of the S. pneumoniae strain 19A Hungary 6 AI open reading frames may be replaced by a sequence having sequence homology to the replaced ORF.

[0633] One or more of the S. pneumoniae strain 19A Hungary 6 AI surface protein sequences typically include an LPXTG motif (e.g., SEQ ID NO:122) or other sortase substrate motif.

[0634] The S. pneumoniae strain 19A Hungary 6 AI surface proteins of the invention may affect the ability of the S. pneumoniae bacteria to adhere to and invade epithelial cells. AI surface proteins may also affect the ability of S. pneumoniae to translocate through an epithelial cell layer. Preferably, one or more S. pneumoniae strain 19A Hungary 6 AI surface proteins are capable of binding to or otherwise associating with an epithelial cell surface. S. pneumoniae strain 19A Hungary 6 AI surface proteins may also be able to bind to or associate with fibrinogen, fibronectin, or collagen.

[0635] The S. pneumoniae strain 19A Hungary 6 AI sortase proteins are predicted to be involved in the secretion and anchoring of the LPXTG containing surface proteins. S. pneumoniae strain 19A Hungary 6 AI may encode for at least one surface protein. Alternatively, S. pneumoniae strain 19A Hungary 6 AI may encode for at least two surface exposed proteins and at least one sortase. Preferably, S. pneumoniae strain 19A Hungary 6 AI encodes for at least three surface exposed proteins and at least two sortases.

[0636] The AI surface proteins may be covalently attached to the bacterial cell wall by membrane-associated transpeptidases, such as an AI sortase. The sortase may function to cleave the surface protein, preferably between the threonine and glycine residues of an LPXTG motif. The sortase may then assist in the formation of an amide link between the threonine carboxyl group and a cell wall precursor such as lipid II. The precursor can then be incorporated into the peptidoglycan via the transglycoslylation and transpeptidation reactions of bacterial wall synthesis. See Comfort et al., Infection & Immunity (2004) 72(5): 2710-2722.

[0637] In one embodiment, the invention includes a composition comprising oligomeric, pilus-like structures comprising a S. pneumoniae strain 19A Hungary 6 AI surface protein such as orf3_{—}19AH, orf4_{—}19AH, or orf5_{—}19AH. The oligomeric, pilus-like structure may comprise numerous units of AI surface protein. Preferably, the oligomeric, pilus-like structures comprise two or more AI surface proteins. Still more preferably, the oligomeric, pilus-like structure comprises a hyper-oligomeric pilus-like structure comprising at least two (e.g., 2, 3, 4, 5, 6, 7, 8, 9, 10, 11, 12, 13, 14, 15, 20, 25, 30, 35, 40, 45, 50, 60, 70, 80, 90, 100, 120, 140, 150, 200 or more) oligomeric subunits, wherein each subunit comprises an AI surface protein or a fragment thereof. The oligomeric subunits may be covalently associated via a conserved lysine within a pilin motif. The oligomeric subunits may be covalently associated via an LPXTG motif, preferably, via the threonine or serine amino acid residue, respectively.

[0638] AI surface proteins or fragments thereof to be incorporated into the oligomeric, pilus-like structures of the invention will preferably include a pilin motif.

[0639] The oligomeric, pilus like structures may be used alone or in the combinations of the invention. In one embodiment, the invention comprises a S. pneumoniae strain 19A Hungary 6 AI protein in oligomeric form, preferably in a hyperoligomeric form. In one embodiment, the invention comprises a composition comprising one or more S. pneumoniae strain 19A Hungary 6 AI proteins and one or more AI proteins from one of any one of S. pneumoniae from TIGR4, 670, 14 CSR 10, 6B Finland 12, 6B Spain 2, 9V Spain 3, 19F Taiwan 14, 23F Taiwan 15, or 23F Poland 16 AI GR4 AI proteins, wherein one or more of the S. pneumoniae AI proteins is in the form of an oligomer, preferably in a hyperoligomeric form.

[0640] In addition to the open reading frames encoding the S. pneumoniae strain 19A Hungary 6 AI proteins, S. pneumoniae strain 19A Hungary 6 AI may also include a transcriptional regulator.

S. pneumoniae Strain 19F Taiwan 14 Adhesin Island

[0641] As discussed above, Applicants have identified adhesin islands within the genome of S. pneumoniae strain 19F Taiwan 14. The S. pneumoniae strain 19F Taiwan 14 Adhesin Island comprises a series of approximately seven open reading frames encoding for a collection of amino acid sequences comprising surface proteins and sortases. Specifically, the S. pneumoniae strain 19F Taiwan 14 AI proteins includes open reading frames encoding for two or more (i.e., 2, 3, 4, 5, 6, or 7) of ORF2_{—}19FTW, ORF3_{—}19FTW, ORF4_{—}19FTW, ORF5_{—}19FTW, ORF6_{—}19FTW, ORF7_{—}19FTW, ORF8_{—}19FTW.

[0642] A preferred immunogenic composition of the invention comprises a S. pneumoniae strain 19F Taiwan 14 AI surface protein which may be formulated or purified in an oligomeric (pilus) form. Another preferred immunogenic composition of the invention comprises a S. pneumoniae strain 19F Taiwan 14 AI surface protein which has been isolated in an oligomeric (pilus) form.

[0643] One or more of the S. pneumoniae strain 19F Taiwan 14 AI open reading frame polynucleotide sequences may be replaced by a polynucleotide sequence coding for a fragment of the replaced ORF. Alternatively, one or more of the S. pneumoniae strain 19F Taiwan 14 AI open reading frames may be replaced by a sequence having sequence homology to the replaced ORF.

[0644] One or more of the S. pneumoniae strain 19F Taiwan 14 AI surface protein sequences typically include an LPXTG motif (e.g., SEQ ID NO:122) or other sortase substrate motif.

[0645] The S. pneumoniae strain 19F Taiwan 14 AI surface proteins of the invention may affect the ability of the S. pneumoniae bacteria to adhere to and invade epithelial cells. AI surface proteins may also affect the ability of S. pneumoniae to translocate through an epithelial cell layer. Preferably, one or more S. pneumoniae strain 19F Taiwan 14 AI surface proteins are capable of binding to or otherwise associating with an epithelial cell surface. S. pneumoniae strain 19F Taiwan 14 AI surface proteins may also be able to bind to or associate with fibrinogen, fibronectin, or collagen.

[0646] The S. pneumoniae strain 19F Taiwan 14 AI sortase proteins are predicted to be involved in the secretion and anchoring of the LPXTG containing surface proteins. S. pneumoniae strain 19F Taiwan 14 AI may encode for at least one surface protein. Alternatively, S. pneumoniae strain 19F Taiwan 14 AI may encode for at least two surface exposed proteins and at least one sortase. Preferably, S. pneumoniae strain 19F Taiwan 14 AI encodes for at least three surface exposed proteins and at least two sortases.

[0647] The AI surface proteins may be covalently attached to the bacterial cell wall by membrane-associated transpeptidases, such as an AI sortase. The sortase may function to cleave the surface protein, preferably between the threonine and glycine residues of an LPXTG motif. The sortase may then assist in the formation of an amide link between the threonine carboxyl group and a cell wall precursor such as lipid II. The precursor can then be incorporated into the peptidoglycan via the transglycoslylation and transpeptidation reactions of bacterial wall synthesis. See Comfort et al., Infection & Immunity (2004) 72(5): 2710-2722.

[0648] In one embodiment, the invention includes a composition comprising oligomeric, pilus-like structures comprising a S. pneumoniae strain 19F Taiwan 14 AI surface protein such as orf3_{—}19FTW, orf4_{—}19FTW, or orf5_{—}19FTW. The oligomeric, pilus-like structure may comprise numerous units of AI surface protein. Preferably, the oligomeric, pilus-like structures comprise two or more AI surface proteins. Still more preferably, the oligomeric, pilus-like structure comprises a hyper-oligomeric pilus-like structure comprising at least two (e.g., 2, 3, 4, 5, 6, 7, 8, 9, 10, 11, 12, 13, 14, 15, 20, 25, 30, 35, 40, 45, 50, 60, 70, 80, 90, 100, 120, 140, 150, 200 or more) oligomeric subunits, wherein each subunit comprises an AI surface protein or a fragment thereof. The oligomeric subunits may be covalently associated via a conserved lysine within a pilin motif. The oligomeric subunits may be covalently associated via an LPXTG motif, preferably, via the threonine or serine amino acid residue, respectively.

[0649] AI surface proteins or fragments thereof to be incorporated into the oligomeric, pilus-like structures of the invention will preferably include a pilin motif.

[0650] The oligomeric, pilus like structures may be used alone or in the combinations of the invention. In one embodiment, the invention comprises a S. pneumoniae strain 19F Taiwan 14 AI protein in oligomeric form, preferably in a hyperoligomeric form. In one embodiment, the invention comprises a composition comprising one or more S. pneumoniae strain 19F Taiwan 14 AI proteins and one or more AI proteins of any one or more of S. pneumoniae from TIGR4, 670, 19A Hungary 6, 6B Finland 12, 6B Spain 2, 9V Spain 3, 14 CSR 10, 23F Taiwan 15, or 23F Poland 16, wherein one or more of the S. pneumoniae AI proteins is in the form of an oligomer, preferably in a hyperoligomeric form.

[0651] In addition to the open reading frames encoding the S. pneumoniae strain 19F Taiwan 14 AI proteins, S. pneumoniae strain 19F Taiwan 14 AI may also include a transcriptional regulator.

S. pneumoniae Strain 23F Poland 16 Adhesin Island

[0652] As discussed above, Applicants have identified adhesin islands within the genome of S. pneumoniae strain 23F Poland 16. The S. pneumoniae strain 23F Poland 16 Adhesin Island comprises a series of approximately seven open reading frames encoding for a collection of amino acid sequences comprising surface proteins and sortases. Specifically, the S. pneumoniae strain 23F Poland 16 AI proteins includes open reading frames encoding for two or more (i.e., 2, 3, 4, 5, 6, or 7) of ORF2_{—}23FP, ORF3_{—}23FP, ORF4_{—}23FP, ORF5_{—}23FP, ORF6_{—}23FP, ORF7_{—}23FP, and ORF8_{—}23FP.

[0653] A preferred immunogenic composition of the invention comprises a S. pneumoniae strain 23F Poland 16 AI surface protein which may be formulated or purified in an oligomeric (pilus) form. Another preferred immunogenic composition of the invention comprises a S. pneumoniae strain 23F Poland 16 AI surface protein which has been isolated in an oligomeric (pilus) form.

[0654] One or more of the S. pneumoniae strain 23F Poland 16 AI open reading frame polynucleotide sequences may be replaced by a polynucleotide sequence coding for a fragment of the replaced ORF. Alternatively, one or more of the S. pneumoniae strain 23F Poland 16 AI open reading frames may be replaced by a sequence having sequence homology to the replaced ORF.

[0655] One or more of the S. pneumoniae strain 23F Poland 16 AI surface protein sequences typically include an LPXTG motif (e.g., SEQ ID NO:122) or other sortase substrate motif.

[0656] The S. pneumoniae strain 23F Poland 16 AI surface proteins of the invention may affect the ability of the S. pneumoniae bacteria to adhere to and invade epithelial cells. AI surface proteins may also affect the ability of S. pneumoniae to translocate through an epithelial cell layer. Preferably, one or more S. pneumoniae strain 23F Poland 16 AI surface proteins are capable of binding to or otherwise associating with an epithelial cell surface. S. pneumoniae strain 23F Poland 16 AI surface proteins may also be able to bind to or associate with fibrinogen, fibronectin, or collagen.

[0657] The S. pneumoniae strain 23F Poland 16 AI sortase proteins are predicted to be involved in the secretion and anchoring of the LPXTG containing surface proteins. S. pneumoniae strain 23F Poland 16 AI may encode for at least one surface protein. Alternatively, S. pneumoniae strain 23F Poland 16 AI may encode for at least two surface exposed proteins and at least one sortase. Preferably, S. pneumoniae strain 23F Poland 16 AI encodes for at least three surface exposed proteins and at least two sortases.

[0658] The AI surface proteins may be covalently attached to the bacterial cell wall by membrane-associated transpeptidases, such as an AI sortase. The sortase may function to cleave the surface protein, preferably between the threonine and glycine residues of an LPXTG motif. The sortase may then assist in the formation of an amide link between the threonine carboxyl group and a cell wall precursor such as lipid II. The precursor can then be incorporated into the peptidoglycan via the transglycoslylation and transpeptidation reactions of bacterial wall synthesis. See Comfort et al., Infection & Immunity (2004) 72(5): 2710-2722.

[0659] In one embodiment, the invention includes a composition comprising oligomeric, pilus-like structures comprising a S. pneumoniae strain 23F Poland 16 AI surface protein such as orf3_{—}23FP, orf4_{—}23FP, or orf5_{—}23FP. The oligomeric, pilus-like structure may comprise numerous units of AI surface protein. Preferably, the oligomeric, pilus-like structures comprise two or more AI surface proteins. Still more preferably, the oligomeric, pilus-like structure comprises a hyper-oligomeric pilus-like structure comprising at least two (e.g., 2, 3, 4, 5, 6, 7, 8, 9, 10, 11, 12, 13, 14, 15, 20, 25, 30, 35, 40, 45, 50, 60, 70, 80, 90, 100, 120, 140, 150, 200 or more) oligomeric subunits, wherein each subunit comprises an AI surface protein or a fragment thereof. The oligomeric subunits may be covalently associated via a conserved lysine within a pilin motif. The oligomeric subunits may be covalently associated via an LPXTG motif, preferably, via the threonine or serine amino acid residue, respectively.

[0660] AI surface proteins or fragments thereof to be incorporated into the oligomeric, pilus-like structures of the invention will preferably include a pilin motif.

[0661] The oligomeric, pilus like structures may be used alone or in the combinations of the invention. In one embodiment, the invention comprises a S. pneumoniae strain 23F Poland 16 AI protein in oligomeric form, preferably in a hyperoligomeric form. In one embodiment, the invention comprises a composition comprising one or more S. pneumoniae strain 23F Poland 16 AI proteins and one or more AI proteins from any one or more S. pneumoniae strains of TIGR4, 670, 19A Hungary 6, 6B Finland 12, 6B Spain 2, 9V Spain 3, 19F Taiwan 14, 23F Taiwan 15, or 14 CSR 10, wherein one or more of the S. pneumoniae AI proteins is in the form of an oligomer, preferably in a hyperoligomeric form.

[0662] In addition to the open reading frames encoding the S. pneumoniae strain 23F Poland 16 AI proteins, S. pneumoniae strain 23F Poland 16 AI may also include a transcriptional regulator.

S. pneumoniae Strain 23F Taiwan 15 Adhesin Island

[0663] As discussed above, Applicants have identified adhesin islands within the genome of S. pneumoniae strain 23F Taiwan 15. The S. pneumoniae strain 23F Taiwan 15 Adhesin Island comprises a series of approximately seven open reading frames encoding for a collection of amino acid sequences comprising surface proteins and sortases. Specifically, the S. pneumoniae strain 23F Taiwan 15 AI proteins includes open reading frames encoding for two or more (i.e., 2, 3, 4, 5, 6, or 7) of ORF2_{—}23FTW, ORF3_{—}23FTW, ORF4_{—}23FTW, ORF5_{—}23FTW, ORF6_{—}23FTW, ORF7_{—}23FTW, ORF8_{—}23FTW.

[0664] A preferred immunogenic composition of the invention comprises a S. pneumoniae strain 23F Taiwan 15 AI surface protein which may be formulated or purified in an oligomeric (pilus) form. Another preferred immunogenic composition of the invention comprises a S. pneumoniae strain 23F Taiwan 15 AI surface protein which has been isolated in an oligomeric (pilus) form.

[0665] One or more of the S. pneumoniae strain 23F Taiwan 15 AI open reading frame polynucleotide sequences may be replaced by a polynucleotide sequence coding for a fragment of the replaced ORF. Alternatively, one or more of the S. pneumoniae strain 23F Taiwan 15 AI open reading frames may be replaced by a sequence having sequence homology to the replaced ORF.

[0666] One or more of the S. pneumoniae strain 23F Taiwan 15 AI surface protein sequences typically include an LPXTG motif (e.g., SEQ ID NO:122) or other sortase substrate motif.

[0667] The S. pneumoniae strain 23F Taiwan 15 AI surface proteins of the invention may affect the ability of the S. pneumoniae bacteria to adhere to and invade epithelial cells. AI surface proteins may also affect the ability of S. pneumoniae to translocate through an epithelial cell layer. Preferably, one or more S. pneumoniae strain 23F Taiwan 15 AI surface proteins are capable of binding to or otherwise associating with an epithelial cell surface. S. pneumoniae strain 23F Taiwan 15 AI surface proteins may also be able to bind to or associate with fibrinogen, fibronectin, or collagen.

[0668] The S. pneumoniae strain 23F Taiwan 15 AI sortase proteins are predicted to be involved in the secretion and anchoring of the LPXTG containing surface proteins. S. pneumoniae strain 23F Taiwan 15 AI may encode for at least one surface protein. Alternatively, S. pneumoniae strain 23F Taiwan 15 AI may encode for at least two surface exposed proteins and at least one sortase. Preferably, S. pneumoniae strain 23F Taiwan 15 AI encodes for at least three surface exposed proteins and at least two sortases.

[0669] The AI surface proteins may be covalently attached to the bacterial cell wall by membrane-associated transpeptidases, such as an AI sortase. The sortase may function to cleave the surface protein, preferably between the threonine and glycine residues of an LPXTG motif. The sortase may then assist in the formation of an amide link between the threonine carboxyl group and a cell wall precursor such as lipid II. The precursor can then be incorporated into the peptidoglycan via the transglycoslylation and transpeptidation reactions of bacterial wall synthesis. See Comfort et al., Infection & Immunity (2004) 72(5): 2710-2722.

[0670] In one embodiment, the invention includes a composition comprising oligomeric, pilus-like structures comprising a S. pneumoniae strain 23F Taiwan 15 AI surface protein such as orf3_{—}23FTW, orf4_{—}23FTW, or orf5_{—}23FTW. The oligomeric, pilus-like structure may comprise numerous units of AI surface protein. Preferably, the oligomeric, pilus-like structures comprise two or more AI surface proteins. Still more preferably, the oligomeric, pilus-like structure comprises a hyper-oligomeric pilus-like structure comprising at least two (e.g., 2, 3, 4, 5, 6, 7, 8, 9, 10, 11, 12, 13, 14, 15, 20, 25, 30, 35, 40, 45, 50, 60, 70, 80, 90, 100, 120, 140, 150, 200 or more) oligomeric subunits, wherein each subunit comprises an AI surface protein or a fragment thereof. The oligomeric subunits may be covalently associated via a conserved lysine within a pilin motif. The oligomeric subunits may be covalently associated via an LPXTG motif, preferably, via the threonine or serine amino acid residue, respectively.

[0671] AI surface proteins or fragments thereof to be incorporated into the oligomeric, pilus-like structures of the invention will preferably include a pilin motif.

[0672] The oligomeric, pilus like structures may be used alone or in the combinations of the invention. In one embodiment, the invention comprises a S. pneumoniae strain 23F Taiwan 15 AI protein in oligomeric form, preferably in a hyperoligomeric form. In one embodiment, the invention comprises a composition comprising one or more S. pneumoniae strain 23F Taiwan 15 AI proteins and one or more AI proteins from any one or more of S. pneumoniae from TIGR4, 670, 19A Hungary 6, 6B Finland 12, 6B Spain 2, 9V Spain 3, 19F Taiwan 14, 14 CSR 10, or 23F Poland 16 AI, wherein one or more of the S. pneumoniae AI proteins is in the form of an oligomer, preferably in a hyperoligomeric form.

[0673] In addition to the open reading frames encoding the S. pneumoniae strain 23F Taiwan 15 AI proteins, S. pneumoniae strain 23F Taiwan 15 AI may also include a transcriptional regulator.

S. pneumoniae Strain 6B Finland 12 Adhesin Island

[0674] As discussed above, Applicants have identified adhesin islands within the genome of S. pneumoniae strain 6B Finland 12. The S. pneumoniae strain 6B Finland 12 Adhesin Island comprises a series of approximately seven open reading frames encoding for a collection of amino acid sequences comprising surface proteins and sortases. Specifically, the S. pneumoniae strain 6B Finland 12 AI proteins includes open reading frames encoding for two or more (i.e., 2, 3, 4, 5, 6, or 7) of ORF2_{—}6BF, ORF3_{—}6BF, ORF4_{—}6BF, ORF56B_F, ORF6_{—}6BF, ORF7_{—}6BF, ORF8_{—}6BF.

[0675] A preferred immunogenic composition of the invention comprises a S. pneumoniae strain 6B Finland 12 AI surface protein which may be formulated or purified in an oligomeric (pilus) form. Another preferred immunogenic composition of the invention comprises a S. pneumoniae strain 6B Finland 12 AI surface protein which has been isolated in an oligomeric (pilus) form.

[0676] One or more of the S. pneumoniae strain 6B Finland 12 AI open reading frame polynucleotide sequences may be replaced by a polynucleotide sequence coding for a fragment of the replaced ORF. Alternatively, one or more of the S. pneumoniae strain 6B Finland 12 AI open reading frames may be replaced by a sequence having sequence homology to the replaced ORF.

[0677] One or more of the S. pneumoniae strain 6B Finland 12 AI surface protein sequences typically include an LPXTG motif (e.g., SEQ ID NO:122) or other sortase substrate motif.

[0678] The S. pneumoniae strain 6B Finland 12 AI surface proteins of the invention may affect the ability of the S. pneumoniae bacteria to adhere to and invade epithelial cells. AI surface proteins may also affect the ability of S. pneumoniae to translocate through an epithelial cell layer. Preferably, one or more S. pneumoniae strain 6B Finland 12 AI surface proteins are capable of binding to or otherwise associating with an epithelial cell surface. S. pneumoniae strain 6B Finland 12 AI surface proteins may also be able to bind to or associate with fibrinogen, fibronectin, or collagen.

[0679] The S. pneumoniae strain 6B Finland 12 AI sortase proteins are predicted to be involved in the secretion and anchoring of the LPXTG containing surface proteins. S. pneumoniae strain 6B Finland 12 AI may encode for at least one surface protein. Alternatively, S. pneumoniae strain 6B Finland 12 AI may encode for at least two surface exposed proteins and at least one sortase. Preferably, S. pneumoniae strain 6B Finland 12 AI encodes for at least three surface exposed proteins and at least two sortases.

[0680] The AI surface proteins may be covalently attached to the bacterial cell wall by membrane-associated transpeptidases, such as an AI sortase. The sortase may function to cleave the surface protein, preferably between the threonine and glycine residues of an LPXTG motif. The sortase may then assist in the formation of an amide link between the threonine carboxyl group and a cell wall precursor such as lipid II. The precursor can then be incorporated into the peptidoglycan via the transglycoslylation and transpeptidation reactions of bacterial wall synthesis. See Comfort et al., Infection & Immunity (2004) 72(5): 2710-2722.

[0681] In one embodiment, the invention includes a composition comprising oligomeric, pilus-like structures comprising a S. pneumoniae strain 6B Finland 12 AI surface protein such as orf3_{—}6BF, orf4_{—}6BF, or orf5_{—}6BF. The oligomeric, pilus-like structure may comprise numerous units of AI surface protein. Preferably, the oligomeric, pilus-like structures comprise two or more AI surface proteins. Still more preferably, the oligomeric, pilus-like structure comprises a hyper-oligomeric pilus-like structure comprising at least two (e.g., 2, 3, 4, 5, 6, 7, 8, 9, 10, 11, 12, 13, 14, 15, 20, 25, 30, 35, 40, 45, 50, 60, 70, 80, 90, 100, 120, 140, 150, 200 or more) oligomeric subunits, wherein each subunit comprises an AI surface protein or a fragment thereof. The oligomeric subunits may be covalently associated via a conserved lysine within a pilin motif. The oligomeric subunits may be covalently associated via an LPXTG motif, preferably, via the threonine or serine amino acid residue, respectively.

[0682] AI surface proteins or fragments thereof to be incorporated into the oligomeric, pilus-like structures of the invention will preferably include a pilin motif.

[0683] The oligomeric, pilus like structures may be used alone or in the combinations of the invention. In one embodiment, the invention comprises a S. pneumoniae strain 6B Finland 12 AI protein in oligomeric form, preferably in a hyperoligomeric form. In one embodiment, the invention comprises a composition comprising one or more S. pneumoniae strain 6B Finland 12 AI proteins and one or more AI proteins of any one or more of S. pneumoniae from TIGR4, 670, 19A Hungary 6, 6B Finland 12, 6B Spain 2, 9V Spain 3, 19F Taiwan 14, 23F Taiwan 15, or 23F Poland 16 AI, wherein one or more of the S. pneumoniae AI proteins is in the form of an oligomer, preferably in a hyperoligomeric form.

[0684] In addition to the open reading frames encoding the S. pneumoniae strain 6B Finland 12 AI proteins, S. pneumoniae strain 6B Finland 12 AI may also include a transcriptional regulator.

S. pneumoniae Strain 6B Spain 2 Adhesin Island

[0685] As discussed above, Applicants have identified adhesin islands within the genome of S. pneumoniae strain 6B Spain 2. The S. pneumoniae strain 6B Spain 2 Adhesin Island comprises a series of approximately seven open reading frames encoding for a collection of amino acid sequences comprising surface proteins and sortases. Specifically, the S. pneumoniae strain 6B Spain 2 AI proteins includes open reading frames encoding for two or more (i.e., 2, 3, 4, 5, 6, or 7) of ORF2_{—}6BSP, ORF3_{—}6BSP, ORF4_{—}6BSP, ORF5_{—}6BSP, ORF6_{—}6BSP, ORF7_{—}6BSP, and ORF8_{—}6BSP.

[0686] A preferred immunogenic composition of the invention comprises a S. pneumoniae strain 6B Spain 2 AI surface protein which may be formulated or purified in an oligomeric (pilus) form. Another preferred immunogenic composition of the invention comprises a S. pneumoniae strain 6B Spain 2 AI surface protein which has been isolated in an oligomeric (pilus) form.

[0687] One or more of the S. pneumoniae strain 6B Spain 2 AI open reading frame polynucleotide sequences may be replaced by a polynucleotide sequence coding for a fragment of the replaced ORF. Alternatively, one or more of the S. pneumoniae strain 6B Spain 2 AI open reading frames may be replaced by a sequence having sequence homology to the replaced ORF.

[0688] One or more of the S. pneumoniae strain 6B Spain 2 AI surface protein sequences typically include an LPXTG motif (e.g., SEQ ID NO:122) or other sortase substrate motif.

[0689] The S. pneumoniae strain 6B Spain 2 AI surface proteins of the invention may affect the ability of the S. pneumoniae bacteria to adhere to and invade epithelial cells. AI surface proteins may also affect the ability of S. pneumoniae to translocate through an epithelial cell layer. Preferably, one or more S. pneumoniae strain 6B Spain 2 AI surface proteins are capable of binding to or otherwise associating with an epithelial cell surface. S. pneumoniae strain 6B Spain 2 AI surface proteins may also be able to bind to or associate with fibrinogen, fibronectin, or collagen.

[0690] The S. pneumoniae strain 6B Spain 2 AI sortase proteins are predicted to be involved in the secretion and anchoring of the LPXTG containing surface proteins. S. pneumoniae strain 6B Spain 2 AI may encode for at least one surface protein. Alternatively, S. pneumoniae strain 6B Spain 2 AI may encode for at least two surface exposed proteins and at least one sortase. Preferably, S. pneumoniae strain 6B Spain 2 AI encodes for at least three surface exposed proteins and at least two sortases.

[0691] The AI surface proteins may be covalently attached to the bacterial cell wall by membrane-associated transpeptidases, such as an AI sortase. The sortase may function to cleave the surface protein, preferably between the threonine and glycine residues of an LPXTG motif. The sortase may then assist in the formation of an amide link between the threonine carboxyl group and a cell wall precursor such as lipid II. The precursor can then be incorporated into the peptidoglycan via the transglycoslylation and transpeptidation reactions of bacterial wall synthesis. See Comfort et al., Infection & Immunity (2004) 72(5): 2710-2722.

[0692] In one embodiment, the invention includes a composition comprising oligomeric, pilus-like structures comprising a S. pneumoniae strain 6B Spain 2 AI surface protein such as orf3_{—}6BSP, orf4_{—}6BSP, or orf5_{—}6BSP. The oligomeric, pilus-like structure may comprise numerous units of AI surface protein. Preferably, the oligomeric, pilus-like structures comprise two or more AI surface proteins. Still more preferably, the oligomeric, pilus-like structure comprises a hyper-oligomeric pilus-like structure comprising at least two (e.g., 2, 3, 4, 5, 6, 7, 8, 9, 10, 11, 12, 13, 14, 15, 20, 25, 30, 35, 40, 45, 50, 60, 70, 80, 90, 100, 120, 140, 150, 200 or more) oligomeric subunits, wherein each subunit comprises an AI surface protein or a fragment thereof. The oligomeric subunits may be covalently associated via a conserved lysine within a pilin motif. The oligomeric subunits may be covalently associated via an LPXTG motif, preferably, via the threonine or serine amino acid residue, respectively.

[0693] AI surface proteins or fragments thereof to be incorporated into the oligomeric, pilus-like structures of the invention will preferably include a pilin motif.

[0694] The oligomeric, pilus like structures may be used alone or in the combinations of the invention. In one embodiment, the invention comprises a S. pneumoniae strain 6B Spain 2 AI protein in oligomeric form, preferably in a hyperoligomeric form. In one embodiment, the invention comprises a composition comprising one or more S. pneumoniae strain 6B Spain 2 AI proteins and one or more AI proteins of any one or more of S. pneumoniae from TIGR4, 670, 19A Hungary 6, 6B Finland 12, 14 CSR 10, 9V Spain 3, 19F Taiwan 14, 23F Taiwan 15, or 23F Poland 16 AI, wherein one or more of the S. pneumoniae AI proteins is in the form of an oligomer, preferably in a hyperoligomeric form.

[0695] In addition to the open reading frames encoding the S. pneumoniae strain 6B Spain 2 AI proteins, S. pneumoniae strain 6B Spain 2 AI may also include a transcriptional regulator.

S. pneumoniae Strain 9V Spain 3 Adhesin Island

[0696] As discussed above, Applicants have identified adhesin islands within the genome of S. pneumoniae strain 9V Spain 3. The S. pneumoniae strain 9V Spain 3 Adhesin Island comprises a series of approximately seven open reading frames encoding for a collection of amino acid sequences comprising surface proteins and sortases. Specifically, the S. pneumoniae strain 9V Spain 3 AI proteins includes open reading frames encoding for two or more (i.e., 2, 3, 4, 5, 6, or 7) of ORF2_{—}9VSP, ORF3_{—}9VSP, ORF4_{—}9VSP, ORF5_{—}9VSP, ORF6_{—}9VSP, ORF7_{—}9VSP, and ORF8_{—}9VSP.

[0697] A preferred immunogenic composition of the invention comprises a S. pneumoniae strain 9V Spain 3 AI surface protein which may be formulated or purified in an oligomeric (pilus) form. Another preferred immunogenic composition of the invention comprises a S. pneumoniae strain 9V Spain 3 AI surface protein which has been isolated in an oligomeric (pilus) form.

[0698] One or more of the S. pneumoniae strain 9V Spain 3 AI open reading frame polynucleotide sequences may be replaced by a polynucleotide sequence coding for a fragment of the replaced ORF. Alternatively, one or more of the S. pneumoniae strain 9V Spain 3 AI open reading frames may be replaced by a sequence having sequence homology to the replaced ORF.

[0699] One or more of the S. pneumoniae strain 9V Spain 3 AI surface protein sequences typically include an LPXTG motif (e.g., SEQ ID NO:122) or other sortase substrate motif.

[0700] The S. pneumoniae strain 9V Spain 3 AI surface proteins of the invention may affect the ability of the S. pneumoniae bacteria to adhere to and invade epithelial cells. AI surface proteins may also affect the ability of S. pneumoniae to translocate through an epithelial cell layer. Preferably, one or more S. pneumoniae strain 9V Spain 3 AI surface proteins are capable of binding to or otherwise associating with an epithelial cell surface. S. pneumoniae strain 9V Spain 3 AI surface proteins may also be able to bind to or associate with fibrinogen, fibronectin, or collagen.

[0701] The S. pneumoniae strain 9V Spain 3 AI sortase proteins are predicted to be involved in the secretion and anchoring of the LPXTG containing surface proteins. S. pneumoniae strain 9V Spain 3 AI may encode for at least one surface protein. Alternatively, S. pneumoniae strain 9V Spain 3 AI may encode for at least two surface exposed proteins and at least one sortase. Preferably, S. pneumoniae strain 9V Spain 3 AI encodes for at least three surface exposed proteins and at least two sortases.

[0702] The AI surface proteins may be covalently attached to the bacterial cell wall by membrane-associated transpeptidases, such as an AI sortase. The sortase may function to cleave the surface protein, preferably between the threonine and glycine residues of an LPXTG motif. The sortase may then assist in the formation of an amide link between the threonine carboxyl group and a cell wall precursor such as lipid II. The precursor can then be incorporated into the peptidoglycan via the transglycoslylation and transpeptidation reactions of bacterial wall synthesis. See Comfort et al., Infection & Immunity (2004) 72(5): 2710-2722.

[0703] In one embodiment, the invention includes a composition comprising oligomeric, pilus-like structures comprising a S. pneumoniae strain 9V Spain 3 AI surface protein such as orf3_{—}9VSP, orf4_{—}9VSP, or orf5_{—}9VSP. The oligomeric, pilus-like structure may comprise numerous units of AI surface protein. Preferably, the oligomeric, pilus-like structures comprise two or more AI surface proteins. Still more preferably, the oligomeric, pilus-like structure comprises a hyper-oligomeric pilus-like structure comprising at least two (e.g., 2, 3, 4, 5, 6, 7, 8, 9, 10, 11, 12, 13, 14, 15, 20, 25, 30, 35, 40, 45, 50, 60, 70, 80, 90, 100, 120, 140, 150, 200 or more) oligomeric subunits, wherein each subunit comprises an AI surface protein or a fragment thereof. The oligomeric subunits may be covalently associated via a conserved lysine within a pilin motif. The oligomeric subunits may be covalently associated via an LPXTG motif, preferably, via the threonine or serine amino acid residue, respectively.

[0704] AI surface proteins or fragments thereof to be incorporated into the oligomeric, pilus-like structures of the invention will preferably include a pilin motif.

[0705] The oligomeric, pilus like structures may be used alone or in the combinations of the invention. In one embodiment, the invention comprises a S. pneumoniae strain 9V Spain 3 AI protein in oligomeric form, preferably in a hyperoligomeric form. In one embodiment, the invention comprises a composition comprising one or more S. pneumoniae strain 9V Spain 3 AI proteins and one or more AI proteins from any one or more of S. pneumoniae from TIGR4, 670, 19A Hungary 6, 6B Finland 12, 6B Spain 2, 14 CSR 10, 19F Taiwan 14, 23F Taiwan 15, or 23F Poland 16 AI, wherein one or more of the S. pneumoniae AI proteins is in the form of an oligomer, preferably in a hyperoligomeric form.

[0706] In addition to the open reading frames encoding the S. pneumoniae strain 9V Spain 3 AI proteins, S. pneumoniae strain 9V Spain 3 AI may also include a transcriptional regulator.

[0707] The S. pneumoniae oligomeric, pilus-like structures may be isolated or purified from bacterial cultures in which the bacteria express an S. pneumoniae AI surface protein. The invention therefore includes a method for manufacturing an oligomeric AI surface antigen comprising culturing a S. pneumoniae bacterium that expresses the oligomeric AI protein and isolating the expressed oligomeric AI protein from the S. pneumoniae bacteria. The AI protein may be collected from secretions into the supernatant or it may be purified from the bacterial surface. The method may further comprise purification of the expressed AI protein. Preferably, the AI protein is in a hyperoligomeric form.

[0708] The oligomeric, pilus-like structures may be isolated or purified from bacterial cultures overexpressing an AI surface protein. The invention therefore includes a method for manufacturing an S. pneumoniae oligomeric Adhesin Island surface antigen comprising culturing a S. pneumoniae bacterium adapted for increased AI protein expression and isolation of the expressed oligomeric Adhesin Island protein from the S. pneumoniae bacteria. The AI protein may be collected from secretions into the supernatant or it may be purified from the bacterial surface. The method may further comprise purification of the expressed Adhesin Island protein. Preferably, the Adhesin Island protein is in a hyperoligomeric form.

[0709] The S. pneumoniae bacteria are preferably adapted to increase AI protein expression by at least two (e.g., 2, 3, 4, 5, 8, 10, 15, 20, 25, 30, 35, 40, 45, 50, 60, 70, 80, 90, 100, 125, 150 or 200) times wild type expression levels.

[0710] S. pneumoniae bacteria may be adapted to increase AI protein expression by any means known in the art, including methods of increasing gene dosage and methods of gene upregulation. Such means include, for example, transformation of the S. pneumoniae bacteria with a plasmid encoding the AI protein. The plasmid may include a strong promoter or it may include multiple copies of the sequence encoding the AI protein. Optionally, the sequence encoding the AI protein within the S. pneumoniae bacterial genome may be deleted. Alternatively, or in addition, the promoter regulating the S. pneumoniae Adhesin Island may be modified to increase expression.

[0711] The invention further includes S. pneumoniae bacteria which have been adapted to produce increased levels of AI surface protein. In particular, the invention includes S. pneumoniae bacteria which have been adapted to produce oligomeric or hyperoligomeric AI surface protein. In one embodiment, the S. pneumoniae of the invention are inactivated or attenuated to permit in vivo delivery of the whole bacteria, with the AI surface protein exposed on its surface.

[0712] The invention further includes S. pneumoniae bacteria which have been adapted to have increased levels of expressed AI protein incorporated in pili on their surface. The S. pneumoniae bacteria may be adapted to have increased exposure of oligomeric or hyperoligomeric AI proteins on its surface by increasing expression levels of a signal peptidase polypeptide. Increased levels of a local signal peptidase expression in Gram positive bacteria (such us LepA in GAS) are expected to result in increased exposure of pili proteins on the surface of Gram positive bacteria. Increased expression of a leader peptidase in S. pneumoniae may be achieved by any means known in the art, such as increasing gene dosage and methods of gene upregulation. The S. pneumoniae bacteria adapted to have increased levels of leader peptidase may additionally be adapted to express increased levels of at least one pili protein.

[0713] Alternatively, the AI proteins of the invention may be expressed on the surface of a non-pathogenic Gram positive bacteria, such as Streptococcus gordonii (See, e.g., Byrd et al., “Biological consequences of antigen and cytokine co-expression by recombinant Streptococcus gordonii vaccine vectors, ” Vaccine (2002) 20:2197-2205) or Lactococcus lactis (See, e.g., Mannam et al., “Mucosal Vaccine Made from Live, Recombinant Lactococcus lactis Protects Mice against Pharyngeal Infection with Streptococcus pyogenes” Infection and Immunity (2004) 72(6):3444-3450). As used herein, non-pathogenic Gram positive bacteria refer to Gram positive bacteria which are compatible with a human host subject and are not associated with human pathogenesis. Preferably, the non-pathogenic bacteria are modified to express the AI surface protein in oligomeric, or hyper-oligomeric form. Sequences encoding for an AI surface protein and, optionally, an AI sortase, may be integrated into the non-pathogenic Gram positive bacterial genome or inserted into a plasmid. The non-pathogenic Gram positive bacteria may be inactivated or attenuated to facilitate in vivo delivery of the whole bacteria, with the AI surface protein exposed on its surface. Alternatively, the AI surface protein may be isolated or purified from a bacterial culture of the non-pathogenic Gram positive bacteria. For example, the AI surface protein may be isolated from cell extracts or culture supernatants. Alternatively, the AI surface protein may be isolated or purified from the surface of the non-pathogenic Gram positive bacteria.

[0714] The non-pathogenic Gram positive bacteria may be used to express any of the S. pneumoniae Adhesin Island proteins described herein. The non-pathogenic Gram positive bacteria are transformed to express an Adhesin Island surface protein. Preferably, the non-pathogenic Gram positive bacteria also express at least one Adhesin Island sortase. The AI transformed non-pathogenic Gram positive bacteria of the invention may be used to prevent or treat infection with pathogenic S. pneumoniae.

[0715] FIGS. 190A and B, and 193-195 provide examples of three methods successfully practiced by applicants to purify pili from S. pneumoniae TIGR4.

### Immunogenic Compositions

[0716] The Gram positive bacteria AI proteins described herein are useful in immunogenic compositions for the prevention or treatment of Gram positive bacterial infection. For example, the GBS AI surface proteins described herein are useful in immunogenic compositions for the prevention or treatment of GBS infection. As another example, the GAS AI surface proteins described herein may be useful in immunogenic compositions for the prevention or treatment of GAS infection. As another example, the S. pneumoniae AI surface proteins may be useful in immunogenic compositions for the prevention or treatment of S. pneumoniae infection.

[0717] Gram positive bacteria AI surface proteins that can provide protection across more than one serotype or strain isolate may be used to increase immunogenic effectiveness. For example, a particular GBS AI surface protein having an amino acid sequence that is at least 50% (i.e., at least 55%, 60%, 65%, 70%, 75%, 80%, 85%, 90%, 95%, 96%, 97%, 98%, 99%, or 100%) homologous to the particular GBS AI surface protein of at least 2 (i.e., at least 3, 4, 5, 6, 7, 8, 9, 10, or more) other GBS serotypes or strain isolates may be used to increase the effectiveness of such compositions.

[0718] As another example, fragments of Gram positive bacteria AI surface proteins that can provide protection across more than one serotype or strain isolate may be used to increase immunogenic effectiveness. Such a fragment may be identified within a consensus sequence of a full length amino acid sequence of a Gram positive bacteria AI surface protein. Such a fragment can be identified in the consensus sequence by its high degree of homology or identity across multiple (i.e, at least 3, 4, 5, 6, 7, 8, 9, 10, or more) Gram positive bacteria serotypes or strain isolates. Preferably, a high degree of homology is a degree of homology of at least 90% (i.e., at least 90%, 91%, 92%, 93%, 94%, 95%, 96%, 97%, 98%, 99%, or 100%) (across Gram positive bacteria serotypes or strain isolates. Preferably, a high degree of identity is a degree of identity of at least 90% (i.e., at least 90%, 91%, 92%, 93%, 94%, 95%, 96%, 97%, 98%, 99%, or 100%) across Gram positive bacteria serotypes or strain isolates. In one embodiment of the invention, such a fragment of a Gram positive bacteria AI surface protein may be used in the immunogenic compositions.

[0719] In addition, the AI surface protein oligomeric pilus structures may be formulated or purified for use in immunization. Isolated AI surface protein oligomeric pilus structures may also be used for immunization.

[0720] The invention includes an immunogenic composition comprising a first Gram positive bacteria AI protein and a second Gram positive bacterial AI protein. One or more of the AI proteins may be a surface protein. Such surface proteins may contain an LPXTG motif or other sortase substrate motif.

[0721] The first and second AI proteins may be from the same or different genus or species of Gram positive bacteria. If within the same species, the first and second AI proteins may be from the same or different AI subtypes. If two AIs are of the same subtype, the AIs have the same numerical designation. For example, all AIs designated as AI-1 are of the same AI subtype. If two AIs are of a different subtype, the AIs have different numerical designations. For example, AI-1 is of a different AI subtype from AI-2, AI-3, AI-4, etc. Likewise, AI-2 is of a different AI subtype from AI-1, AI-3, and AI-4, etc.

[0722] For example, the invention includes an immunogenic composition comprising one or more GBS AI-1 proteins and one or more GBS AI-2 proteins. One or more of the AI proteins may be a surface protein. Such surface proteins may contain an LPXTG motif (e.g., SEQ ID NO:122) and may bind fibrinogen, fibronectin, or collagen. One or more of the AI proteins may be a sortase. The GBS AI-1 proteins may be selected from the group consisting of GBS 80, GBS 104, GBS 52, SAG0647 and SAG0648. Preferably, the GBS AI-1 proteins include GBS 80 or GBS 104.

[0723] The GBS AI-2 proteins may be selected from the group consisting of GBS 67, GBS 59, GBS 150, SAG1405, SAG1406, 01520, 01521, 01522, 01523, 01523, 01524 and 01525. In one embodiment, the GBS AI-2 proteins are selected from the group consisting of GBS 67, GBS 59, GBS 150, SAG1405, and SAG1406. In another embodiment, the GBS AI-2 proteins may be selected from the group consisting of 01520, 01521, 01522, 01523, 01523, 01524 and 01525. Preferably, the GBS AI-2 protein includes GBS 59 or GBS 67.

[0724] As another example, the invention includes an immunogenic composition comprising one or more of any combination of GAS AI-1, GAS AI-2, GAS AI-3, or GAS AI-4 proteins. One or more of the GAS AI proteins may be a sortase. The GAS AI-1 proteins may be selected from the group consisting of M6_Spy0156, M6_Spy0157, M6_Spy0158, M6_Spy0159, M6_Spy0160, M6_Spy0161, DCD SS 410_fimbrial, ISS3650_fimbrial, and DSM2071_fimbrial. Preferably, the GAS AI-1 proteins are selected from the group consisting of M6_Spy0157, M6_Spy0159, M6_Spy0160, CDC SS 410_fimbrial, ISS3650_fimbrial, and DSM2071_fimbrial.

[0725] The GAS AI-2 proteins may be selected from the group consisting of Spy0124, GAS15, Spy0127, GAS16, GAS17, GAS18, Spy0131, Spy0133, and GAS20. Preferably, the GAS AI-2 proteins are selected from the group consisting of GAS 15, GAS16, and GAS18.

[0726] The GAS AI-3 proteins may be selected from the group consisting of SpyM3_{—}0097, SpyM3_{—}0098, SpyM3_{—}0099, SpyM3_{—}0100, SpyM3_{—}0101, SpyM3_{—}0102, SpyM3_{—}0103, SpyM3_{—}0104, SPs0099, SPs0100, SPs0101, SPs0102, SPs0103, SPs0104, SPs0105, SPs0106, orf77, orf78, orf79, orf80, orf81, orf82, orf83, orf84, spyM18_{—}0125, spyM18_{—}0126, spyM18_{—}0127, spyM18_{—}0128, spyM18_{—}0129, spyM18_{—}0130, spyM18_{—}0131, spyM18_{—}0132, SpyoM01000156, SpyoM01000155, SpyoM01000154, SpyoM01000153, SpyoM01000152, SpyoM01000151, SpyoM01000150, SpyoM01000149, ISS3040_fimbrial, ISS3776_fimbrial, and ISS4959_fimbrial. In one embodiment the GAS AI-3 proteins are selected from the group consisting of SpyM3_{—}0097, SpyM3_{—}0098, SpyM3_{—}0099, SpyM3_{—}0100, SpyM3_{—}0101, SpyM3_{—}0102, SpyM3_{—}0103, and SpyM3_{—}0104. In another embodiment, the GAS AI-3 proteins are selected from the group consisting of SPs0099, SPs0100, SPs0101, SPs0102, SPs0103, SPs0104, SPs0105, and SPs0106. In yet another embodiment, the GAS AI-3 proteins are selected from the group consisting of orf77, orf78, orf79, orf80, orf81, orf82, orf83, and orf84. In a further embodiment, the GAS AI-3 proteins are selected from the group consisting of spyM18_{—}0125, spyM18_{—}0126, spyM18_{—}0127, spyM18_{—}0128, spyM8_{—}0129, spyM18_{—}0130, spyM18_{—}0131, and spyM18_{—}0132. In yet another embodiment the GAS AI-3 proteins are selected from the group consisting of SpyoM01000156, SpyoM01000155, SpyoM01000154, SpyoM01000153, SpyoM01000152, SpyoM01000151, SpyoM01000150, and SpyoM01000149.

[0727] The GAS AI-4 proteins may be selected from the group consisting of 19224133, 19224134, 19224135, 19224136, 19224137, 19224138, 19224139, 19224140, 19224141, 20010296_fimbrial, 20020069_fimbrial, CDC SS 635_fimbrial, ISS4883_fimbrial, and ISS4538_fimbrial. Preferably, the GAS-AI4 proteins are selected from the group consisting of 19224134, 19224135, 19224137, 19224139, 19224141, 20010296_fimbrial, 20020069_fimbrial, CDC SS 635_fimbrial, ISS4883_fimbrial, and ISS4538_fimbrial.

[0728] As yet another example, the invention includes an immunogenic composition comprising one or more of any combination of S. pneumoniae from TIGR4, S. pneumoniae strain 670, S. pneumoniae from 19A Hungary 6, S. pneumoniae from 6B Finland 12, S. pneumoniae from 6B Spain 2, S. pneumoniae from 9V Spain 3, S. pneumoniae from 14 CSR 10, S. pneumoniae from 19F Taiwan 14, S. pneumoniae from 23F Taiwan 15, or S. pneumoniae from 23F Poland 16 AI proteins. One or more of the AI proteins may be a surface protein. Such surface proteins may contain an LPXTG motif (e.g., SEQ ID NO:122) and may bind fibrinogen, fibronectin, or collagen. One or more of the AI proteins may be a sortase.

[0729] The S. pneumoniae from TIGR4 AI proteins may be selected from the group consisting of SP0462, SP0463, SP0464, SP0465, SP0466, SP0467, SP0468. Preferably, the S. pneumoniae from TIGR4 AI proteins include SP0462, SP0463, or SP0464.

[0730] The S. pneumoniae strain 670 AI proteins may be selected from the group consisting of Orf1_{—}670, Orf3_{—}670, Orf4_{—}670, Orf5_{—}670, Orf6_{—}670, Orf7_{—}670, and Orf8_{—}670. Preferably, the S. pneumoniae strain 670 AI proteins include Orf3_{—}670, Orf4_{—}670, or Orf5_{—}670.

[0731] The S. pneumoniae from 19A Hungary 6 AI proteins may be selected from the group consisting of ORF2_{—}19AH, ORF3_{—}19AH, ORF4_{—}19AH, ORF5_{—}19AH, ORF6_{—}19AH, ORF7_{—}19AH, or ORF8_{—}19AH.

[0732] The S. pneumoniae from 6B Finland 12 AI proteins may be selected from the group consisting of ORF2_{—}6BF, ORF3_{—}6BF, ORF4_{—}6BF, ORF5_{—}6BF, ORF6_{—}6BF, ORF7_{—}6BF, ORF8_{—}6BF.

[0733] The S. pneumoniae from 6B Spain 2 AI proteins may be selected from the group consisting of ORF2_{—}6BSP, ORF3_{—}6BSP, ORF4_{—}6BSP, ORF5_{—}6BSP, ORF6_{—}6BSP, ORF7_{—}6BSP, or ORF8_BSP.

[0734] The S. pneumoniae from 9V Spain 3 AI proteins may be selected from the group consisting of ORF2_{—}9VSP, ORF3_{—}9VSP, ORF4_{—}9VSP, ORF5_{—}9VSP, ORF6_{—}9VSP, ORF7_{—}8VSP, or ORF8_{—}9VSP.

[0735] The S. pneumoniae from 14 CSR 10 AI proteins may be selected from the group consisting of ORF2_{—}14CSR, ORF3_{—}14CSR, ORF4_{—}14CSR, ORF5_{—}14CSR, ORF6_{—}14CSR, ORF7_{—}14CSR, or ORF8_{—}14CSR.

[0736] The S. pneumoniae from 19F Taiwan 14 AI proteins may be selected from the group consisting of ORF2_{—}19FTW, ORF3_{—}19FTW, ORF4_{—}19FTW, ORF5_{—}19FTW, ORF6_{—}19FTW, ORF7_{—}19FTW, or ORF8_{—}19FTW.

[0737] The S. pneumoniae from 23F Taiwan 15 AI proteins may be selected from the group consisting of ORF2_{—}23FTW, ORF3_{—}23FTW, ORF4_{—}23FTW, ORF5_{—}23FTW, ORF6_{—}23FTW, ORF7_{—}23FTW, or ORF8_{—}23FTW.

[0738] The S. pneumoniae from 23F Poland 16 AI proteins may be selected from the group consisting of ORF2_{—}23FP, ORF3_{—}23FP, ORF4_{—}23FP, ORF5_{—}23FP, ORF6_{—}23FP, ORF7_{—}23FP, or ORF8_{—}23FP.

[0739] Preferably, the Gram positive bacteria AI proteins included in the immunogenic compositions of the invention can provide protection across more than one serotype or strain isolate. For example, the immunogenic composition may comprise a first AI protein, wherein the amino acid sequence of said AI protein is at least 90% (i.e., at least 90, 91, 92, 93, 94, 95, 96, 97, 98, 99 or 100%) homologous to the amino acid sequence of a second AI protein, and wherein said first AI protein and said second AI protein are derived from the genomes of different serotypes of a Gram positive bacteria. The first AI protein may also be homologous to the amino acid sequence of a third AI protein, such that the first AI protein, the second AI protein and the third AI protein are derived from the genomes of different serotypes of a Gram positive bacteria. The first AI protein may also be homologous to the amino acid sequence of a fourth AI protein, such that the first AI protein, the second AI protein and the third AI protein are derived from the genomes of different serotypes of a Gram positive bacteria.

[0740] For example, preferably, the GBS AI proteins included in the immunogenic compositions of the invention can provide protection across more than one GBS serotype or strain isolate. For example, the immunogenic composition may comprise a first GBS AI protein, wherein the amino acid sequence of said AI protein is at least 90% (i.e., at least 90, 91, 92, 93, 94, 95, 96, 97, 98, 99 or 100%) homologous to the amino acid sequence of a second GBS AI protein, and wherein said first AI protein and said second AI protein are derived from the genomes of different GBS serotypes. The first GBS AI protein may also be homologous to the amino acid sequence of a third GBS AI protein, such that the first AI protein, the second AI protein and the third AI protein are derived from the genomes of different GBS serotypes. The first AI protein may also be homologous to the amino acid sequence of a fourth GBS AI protein, such that the first AI protein, the second AI protein and the third AI protein are derived from the genomes of different GBS serotypes.

[0741] The first AI protein may be selected from an AI-1 protein or an AI-2 protein. For example, the first AI protein may be a GBS AI-1 surface protein such as GBS 80. The amino acid sequence of GBS 80 from GBS serotype V, strain isolate 2603 is greater than 90% homologous to the GBS 80 amino acid sequence from GBS serotype III, strain isolates NEM316 and COH1 and the GBS 80 amino acid sequence from GBS serotype la, strain isolate A909.

[0742] As another example, the first AI protein may be GBS 104. The amino acid sequence of GBS 104 from GBS serotype V, strain isolate 2603 is greater than 90% homologous to the GBS 104 amino acid sequence from GBS serotype III, strain isolates NEM316 and COH1, the GBS 104 amino acid sequence from GBS serotype la, strain isolate A909, and the GBS 104 amino acid sequence serotype II, strain isolate 18RS21.

[0743] Table 12 provides the amino acid sequence identity of GBS 80 and GBS 104 across GBS serotypes Ia, Ib, II, III, V, and VIII. The GBS strains in which genes encoding GBS 80 and GBS 104 were identified share, on average, 99.88 and 99.96 amino acid sequence identity, respectively. This high degree of amino acid identity indicates that an immunogenic composition comprising a first protein of GBS 80 or GBS 104 may provide protection across more than one GBS serotype or strain isolate. As another example, the first AI protein may be an AI-2 protein such as GBS 67. The amino acid sequence of GBS 67 from GBS serotype V, strain isolate 2603 is greater than 90% homologous to the GBS 67 amino acid sequence from GBS serotype III, strain isolate NEM316, the GBS 67 amino acid sequence from GBS serotype 1b, strain isolate H36B, and the GBS 67 amino acid sequence from GBS serotype II, strain isolate 17RS21.

[0744] As another example, the first AI protein may be an AI-2 protein such as spb1. The amino acid sequence of spb1 from GBS serotype III, strain isolate COH1 is greater than 90% homologous to the spb1 amino acid sequence from GBS serotype Ia, strain isolate A909.

[0745] As yet another example, the first AI protein may be an AI-2 protein such as GBS 59. The amino acid sequence of GBS 59 from GBS serotype II, strain isolate 18RS21 is 100% homologous to the GBS 59 amino acid sequence from GBS serotype V, strain isolate 2603. The amino acid sequence of GBS 59 from GBS serotype V, strain isolate CJB111 is 98% homologous to the GBS 59 amino acid sequence from GBS serotype III, strain isolate NEM316.

[0746] The compositions of the invention may also be designed to include Gram positive AI proteins from divergent serotypes or strain isolates, i.e., to include a first AI protein which is present in one collection of serotypes or strain isolates of a Gram positive bacteria and a second AI protein which is present in those serotypes or strain isolates not represented by the first AI protein.

[0747] For example, the invention may include an immunogenic composition comprising a first and second Gram positive bacteria AI protein, wherein a polynucleotide sequence encoding for the full length sequence of the first AI protein is not present in a similar Gram positive bacterial genome comprising a polynucleotide sequence encoding for the second AI protein.

[0748] The compositions of the invention may also be designed to include AI proteins from divergent GBS serotypes or strain isolates, i.e., to include a first AI protein which is present in one collection of GBS serotypes or strain isolates and a second AI protein which is present in those serotypes or strain isolates not represented by the first AI protein.

[0749] For example, the invention may include an immunogenic composition comprising a first and second GBS AI protein, wherein a polynucleotide sequence encoding for the full length sequence of the first GBS AI protein is not present in a genome comprising a polynucleotide sequence encoding for the second GBS AI protein. For example, the first AI protein could be GBS 80 (such as the GBS 80 sequence from GBS serotype V, strain isolate 2603). As previously discussed (and depicted in FIG. 2), the sequence for GBS 80 in GBS serotype II, strain isolate 18RS21 is disrupted. In this instance, the second AI protein could be GBS 104 or GBS 67 (sequences selected from the GBS serotype II, strain isolate 18RS21).

[0750] Further, the invention may include an immunogenic composition comprising a first and second GBS AI protein, wherein the first GBS AI protein has detectable surface exposure on a first GBS strain or serotype but not a second GBS strain or serotype and the second GBS AI protein has detectable surface exposure on a second GBS strain or serotype but not a first GBS strain or serotype. For example, the first AI protein could be GBS 80 and the second AI protein could be GBS 67. As seen in Table 15, there are some GBS serotypes and strains that have surface exposed GBS 80 but that do not have surface exposed GBS 67 and vice versa. An immunogenic composition comprising a GBS 80 and a GBS 67 protein may provide protection across a wider group of GBS strains and serotypes.

TABLE 12
Conservation of GBS 80 and GBS 104 amino acid sequences

| | | GBS 80 | | GBS 104 | |
|---|---|---|---|---|---|
| Serotype | Strains | cGH | % AA identity | cGH | % AA identity |
| Ia | 090 | + | 99.79 | + | 100.00 |
| | A909 | + | 100.00 | + | 100.00 |
| | 515 | − | | − | |
| | DK1 | − | | − | |
| | DK8 | − | | − | |
| | Davis | − | | − | |
| Ib | 7357b | + | 100.00 | + | |
| | H36B | − | | − | |
| II | 18RS21 | − | | + | 100.00 |
| | DK21 | − | | − | |
| III | NEM316 | + | 100.00 | + | 100.00 |
| | COH31 | + | 100.00 | + | |
| | D136 | + | 100.00 | + | |
| | M732 | + | 100.00 | + | 99.88 |
| | COH1 | + | 99.79 | + | 99.88 |
| | M781 | + | 99.79 | + | 99.88 |
| No type | CJB110 | + | 99.37 | + | 100.00 |
| | 1169NT | − | | − | |
| V | CJB111 | + | 100.00 | + | 100.00 |
| | 2603 | + | 100.00 | + | 100.00 |
| VIII | JM130013 | + | 99.79 | + | 100.00 |
| | SMU014 | + | 100.00 | + | |

| | | | | |
|---|---|---|---|---|
| total | 14/22 | 99.88 +/− 0.19 | 15/22 | 99.96 +/− 0.056 |

TABLE 15
Antigen surface exposure of GBS 80, GBS 322, GBS 104, and GBS 67

| GBS strains | Type | GBS 80 | GBS 322 | GBS 104 | GBS 67 |
|---|---|---|---|---|---|
| DK1* | Ia | 0 | nd | 237 | 478 |
| DK8* | | 0 | 213 | 151 | 475 |
| Davis* | | 0 | 86 | 271 | 430 |
| 515* | | 0 | 227 | 262 | 409 |
| 090 | | 0 | 0 | 0 | 0 |
| A909 | | 0 | 0 | 0 | 0 |
| 2986 | | 0 | 0 | 157 | 397 |
| 5551 | | 0 | 36 | 384 | 485 |
| 2177 | Ib | 477 | 323 | 328 | 66 |
| H36B* | | 0 | 105 | 518 | 444 |
| 7357b- | | 91 | 102 | 309 | 316 |
| 2129 | | 57 | 71 | 132 | 0 |
| 5518 | | 31 | nd | 60 | 28 |
| COH1 | III | 305 | 130 | 305 | 0 |
| D136C | | 16 | 460 | 226 | 406 |
| COH31 | | 0 | 479 | 71 | 273 |
| M732 | | 105 | 292 | 101 | 0 |
| M781 | | 65 | 224 | 136 | 0 |
| 1998 | | 95 | 288 | 205 | 350 |
| 5376 | | 165 | 76 | 156 | 0 |
| 5435 | | 93 | 88 | 100 | 0 |
| 18RS21 | II | 0 | 471 | 50 | 103 |
| DK21* | | 0 | 342 | 419 | 331 |
| 3050 | | 43 | 188 | 289 | 460 |
| 5401 | | 170 | 135 | 494 | 618 |
| 2141 | | 0 | 76 | 0 | 69 |
| CJB111 | V | 365 | 58 | 355 | 481 |
| 2603 | | 62 | 293 | 100 | 105 |
| 5364 | | 454 | 463 | 379 | 394 |
| 2110 | | 0 | 11 | 345 | 589 |
| 2274 | IV | 113 | 161 | 465 | 484 |
| 1999 | | 0 | 55 | 492 | 453 |
| 2210 | | 0 | 0 | 363 | 574 |
| 2928 | VII | 0 | 0 | 0 | 0 |
| SMU071 | VIII | 556 | 170 | 393 | 79 |
| JM9130013 | | 587 | 133 | 436 | 83 |
| 2189 | | 0 | 0 | 0 | 0 |
| 5408 | | 0 | 0 | 159 | 433 |
| CJB110 | NT | 71 | 587 | 169 | 245 |
| 1169* | | 0 | 213 | 371 | 443 |
| Δ Mean >100 | | 9/40 | 22/38 | 32/40 | 25/40 |
| | | 22% | 58% | 80% | 62% |

[0751] Alternatively, the invention may include an immunogenic composition comprising a first and second Gram positive bacteria AI protein, wherein the polynucleotide sequence encoding the sequence of the first AI protein is less than 90% (i.e., less than 90, 88, 86, 84, 82, 80, 78, 76, 74, 72, 70, 65, 60, 55, 50, 45, 40, 35 or 30 percent) homologous than the corresponding sequence in the genome of the second AI protein.

[0752] The invention may include an immunogenic composition comprising a first and second GBS AI protein, wherein the polynucleotide sequence encoding the sequence of the first GBS AI protein is less than 90% (i.e., less than 90, 88, 86, 84, 82, 80, 78, 76, 74, 72, 70, 65, 60, 55, 50, 45, 40, 35 or 30 percent) homologous than the corresponding sequence in the genome of the second GBS AI protein. For example, the first GBS AI protein could be GBS 67 (such as the GBS 67 sequence from GBS serotype 1b, strain isolate H36B). As shown in FIGS. 2 and 4, the GBS 67 sequence for this strain is less than 90% homologous (87%) to the corresponding GBS 67 sequence in GBS serotype V, strain isolate 2603. In this instance, the second GBS AI protein could then be the GBS 80 sequence from GBS serotype V, strain isolate 2603.

[0753] An example immunogenic composition of the invention may comprise adhesin island proteins GBS 80, GBS 104, GBS 67, and GBS 59, and non-AI protein GBS 322. FACS analysis of different GBS strains demonstrates that at least one of these five proteins is always found to be expressed on the surface of GBS bacteria. An initial FACS analysis of 70 strains of GBS bacteria, obtained from the CDC in the United States (33 strains), ISS in Italy (17 strains), and Houston/Harvard (20 strains), detected surface exposure of at least one of GBS 80, GBS 104, GBS 322, GBS 67, or GBS 59 on the surface of the GBS bacteria. FIG. 227 provides the FACS data obtained for surface exposure of GBS 80, GBS 104, GBS 67, GBS 322, and GBS 59 on each of 37 GBS strains. FIG. 228 provides the FACS data obtained for surface exposure of GBS 80, GBS 104, GBS 67, GBS 322, and GBS 59 on each of 41 GBS strains obtained from the CDC. As can be seen from FIGS. 227 and 228, each GBS strain had surface expression of at least one of GBS 80, GBS 104, GBS 67, GBS 322, and GBS 59. The surface exposure of at least one of these proteins on each bacterial strain indicates that an immunogenic composition comprising these proteins will provide wide protection across GBS strains and serotypes.

[0754] The surface exposed GBS 80, GBS 104, GBS 67, GBS 322, and GBS 59 proteins are also present at high levels as determined by FACS. Table 49 summarizes the FACS results for the initial 70 GBS strains examined for GBS 80, GBS 104, GBS 67, GBS 322, and GBS 59 surface expression. A protein was designated as having high levels of surface expression of a protein if a five-fold shift in fluorescence was observed when using antibodies for the protein relative to preimmune control serum.

TABLE 49
Exposure Levels of GBS 80, GBS 104, GBS 67, GBS 322,
and GBS 59 on GBS Strains

| | GBS 80 | GBS 104 | GBS 67 | GBS 59 | GBS 322 |
|---|---|---|---|---|---|
| 5-fold shift in | 17/70 | 14/70 | 49/70 | 46/70 | 33/70 |
| fluorescence | 24% | 20% | 70% | 66% | 47% |
| by FACS | | | | | |

Table 50 details which of the surface proteins is highly expressed on the different GBS serotype.

TABLE 50
High Levels of Surface Protein Expression on GBS Serotypes

| 5-fold shift in | | | | | |
|---|---|---|---|---|---|
| fluorescence | | | | | |
| by FACS | GBS 80 | GBS 104 | GBS 67 | GBS 59 | GBS 322 |
| Ia + Ib + III | 4/36 | 2/36 | 22/36 | 20/36 | 18/36 |
| II + V | 11/25 | 9/25 | 21/25 | 21/25 | 13/25 |
| Others | 2/9 | 3/9 | 6/9 | 5/9 | 2/9 |

[0755] Alternatively, the immunogenic composition of the invention may include GBS 80, GBS 104, GBS 67, and GBS 322. Assuming that protein antigens that are highly accessible to antibodies confer 100% protection with suitable adjuvants, an immunogenic composition containing GBS 80, GBS 104, GBS 67, GBS 59 and GBS 322 will provide protection for 89% of GBS strains and serotypes, the same percentage as an immunogenic composition containing GBS 80, GBS 104, GBS 67, and GBS 322 proteins. See FIG. 229. However, it may be preferable to include GBS 59 in the composition to increase its immunogenic strength. As seen from Table 50, GBS 59 is highly expressed on the surface two-thirds of GBS bacteria examined by FACS analysis, unlike GBS 80, GBS 104, and GBS 322, which are highly expressed in less than half of GBS bacteria examined. GBS 59 opsonophagocytic activity is also comparable to that of a mix of GBS 322, GBS 104, GBS 67, and GBS 80 proteins. See FIG. 230.

[0756] The invention may include an immunogenic composition comprising a first and second GBS59 polypeptide, wherein the amino acidic sequence encoding the sequence of the first GBS59 polypeptide is less than 90% (i.e., less than 90, 88, 86, 84, 82, 80, 78, 76, 74, 72, 70, 65, 60, 55, 50, 45, 40, 35 or 30 percent) homologous than the corresponding sequence encoded in the genome of the second GBS59 polypeptide. As previously shown, 6 different allelic families of GBS59 polypeptides have been identified (see FIG. 240) which have less than 90% sequence identity. Accordingly, the first and the second GBS59 polypeptides of the invention include but are not limited to any one of the 6 allelic families ancestors (i.e., GBS59^{CJB111}, GBS59^{DK21}, GBS59⁵¹⁵, GBS59^{CJB110}, GBS59²⁶⁰³ and GBS59^{H36B}), leading to 15 possible combinations of two, For example, GBS59^{DK21} and GBS59^{CJB110}. Other possible such combinations are GBS59^{CJB111} and GBS56^{DK21}, GBS59^{CJB111} and GBS59⁵¹⁵, GBS59^{CJB111} and GBS59^{CJB110}, GBS59^{CJB111} and GBS59²⁶⁰³, GBS59^{CJB111} and GBS59^{H36B}, GBS59^{DK21} and GBS59⁵¹⁵, GBS59^{DK21} and GBS59^{2603,} GBS59^{DK21} and GBS59^{H36B}, GBS59⁵¹⁵ and GBS59^{CJB110}, GBS59⁵¹⁵ and GBS59^{2603,} GBS59⁵¹⁵ and GBS59^{H36B}, GBS59^{CJB110} and GBS59^{2603,} G59^{CJB110} and GBS59^{H36B} or GBS59²⁶⁰³ and GBS59^{H36B} GBS.

[0757] By way of another example, preferably, the GAS AI proteins included in the immunogenic compositions of the invention can provide protection across more than one GAS serotype or strain isolate. For example, the immunogenic composition may comprise a first GAS AI protein, wherein the amino acid sequence of said AI protein is at least 90% (i.e., at least 90, 91, 92, 93, 94, 95, 96, 97, 98, 99 or 100%) homologous to the amino acid sequence of a second GAS AI protein, and wherein said first AI protein and said second AI protein are derived from the genomes of different GAS serotypes. The first GAS AI protein may also be homologous to the amino acid sequence of a third GAS AI protein, such that the first AI protein, the second AI protein and the third AI protein are derived from the genomes of different GAS serotypes. The first AI protein may also be homologous to the amino acid sequence of a fourth GAS AI protein, such that the first AI protein, the second AI protein and the third AI protein are derived from the genomes of different GAS serotypes.

[0758] The compositions of the invention may also be designed to include GAS AI proteins from divergent serotypes or strain isolates, i.e., to include a first AI protein which is present in one collection of serotypes or strain isolates of a GAS bacteria and a second AI protein which is present in those serotypes or strain isolates not represented by the first AI protein.

[0759] For example, the first AI protein could be a prtF2 protein (such as the 19224141 protein from GAS serotype M12, strain isolate A735). As previously discussed (and depicted in FIG. 164), the sequence for a prtF2 protein is not present in GAS AI types 1 or 2. In this instance, the second AI protein could be collagen binding protein M6_Spy0159 (from M6 isolate (MGAS10394), which comprises an AI-1) or GAS15 (from M1 isolate (SF370), which comprises an AI-2).

[0760] Further, the invention may include an immunogenic composition comprising a first and second GAS AI protein, wherein the first GAS AI protein has detectable surface exposure on a first GAS strain or serotype but not a second GAS strain or serotype and the second GAS AI protein has detectable surface exposure on a second GAS strain or serotype but not a first GAS strain or serotype.

[0761] The invention may include an immunogenic composition comprising a first and second GAS AI protein, wherein the polynucleotide sequence encoding the sequence of the first GAS AI protein is less than 90% (i.e., less than 90, 88, 86, 84, 82, 80, 78, 76, 74, 72, 70, 65, 60, 55, 50, 45, 40, 35 or 30 percent) homologous than the corresponding sequence in the genome of the second GAS AI protein. Preferably the first and second GAS AI proteins are subunits of the pilus. More preferably the first and second GAS AI proteins are selected from the major pilus forming proteins (i.e., M6_Spy0160 from M6 strain 10394, SPy0128 from M1 strain SF370, SpyM3_{—}0100 from M3 strain 315, SPs0102 from M3 strain SSI, orf80 from M5 isolate Manfredo, spyM18_{—}0128 from M18 strain 8232, SpyoM01000153 from M49 strain 591, 19224137 from M12 strain A735, fimbrial structural subunit from M77 strain ISS4959, fimbrial structural subunit from M44 strain ISS3776, fimbrial structural subunit from M50 strain ISS3776 ISS 4538, fimbrial structural subunit from M12strain CDC SS635, fimbrial structural subunit from M23 strain DSM2071, fimbrial structural subunit from M6 strain CDC SS410). Table 45 provides the percent identity between the amino acidic sequences of each of the main pilus forming subunits from GAS AI-1, AI-2, AI-3, and AI-4 representative strains (i.e., M6_Spy0160 from M6 strain 10394, SPy0128 from M1 strain SF370, SpyM3_{—}0100 from M3 strain 315, SPs0102 from M3 strain SSI, orf80 from M5 isolate Manfredo, spyM18_{—}0128 from M18 strain 8232, SpyoM01000153 from M49 strain 591, 19224137 from M12 strain A735, Fimbrial structural subunit from M77 strain ISS4959, fimbrial structural subunit from M44 strain ISS3776, fimbrial structural subunit from M50 strain ISS3776 ISS 4538, fimbrial structural subunit from M12strain CDC SS635, fimbrial structural subunit from M23 strain DSM2071, fimbrial structural subunit from M6 strain CDC SS410).

TABLE 45
Comparison of Amino Acid Sequences of Major Pilus Proteins in the Four GAS AIs

| | | | | AI-3 | | | |
|---|---|---|---|---|---|---|---|
| | | AI-1 | AI-2 | | M5- | | AI-4 |
| | | M6-10394 | M1-370 | M3-315 | Manfredo | M18-8232 | M12-A735 |
| AI-1 | M6-10394 | 100% | 23% | 25% | 23% | 24% | 26% |
| | | M6-10394 | | | | | |
| | | M6-SS-410 | | | | | |
| | | 56% | | | | | |
| | | M23-DSM2071 | | | | | |
| AI-2 | M1-370 | 23% | 100% | 40% | 41% | 38% | 40% |
| AI-3 | M3-315 | 25% | 40% | 100% | 64% | 67% | 61% |
| | | | | M3-315 | | | |
| | | | | M3-SSI-1 | | | |
| | M5-Manfredo | 23% | 39% | 64% | 100% | 60% | 65% |
| | | | | | M5- | | |
| | | | | | Manfredo | | |
| | | | | | M44-3776 | | |
| | | | | | M77-4959 | | |
| | M18-8232 | 24% | 38% | 67% | 60% | 90% | 62% |
| | | | | | | M18-8232 | |
| | | | | | | M49-591 | |
| AI-4 | M12-A735 | 26% | 40% | 61% | 65% | 62% | 97-100% |
| | | | | | | | M12-A735 |
| | | | | | | | M12-SS-635 |
| | | | | | | | M50-4538 |

[0762] For example, the first main pilus subunit may be selected from bacteria of GAS serotype M6 strain 10394 and the second main pilus subunit may be selected from bacteria of GAS serotype M1 strain 370. As can be seen from Table 45, the main pilus subunits encoded by these strains of bacteria share only 23% nucleotide identity. An immunogenic composition comprising pilus main subunits from each of these strains of bacteria is expected to provide protection across a wider group of GAS strains and serotypes. Other examples of main pilus subunits that can be used in combination to provide increased protection across a wider range of GAS strains and serotypes include proteins encoded by GAS serotype M5 Manfredo isolate and serotype M6 strain 10394, which share 23% sequence identity, GAS serotype M18 strain 8232 and serotype M1 strain 370, which share 38% sequence identity, GAS serotype M3 strain 315 and serotype M12 strain A735, which share 61% sequence identity, and GAS serotype M3 strain 315 and serotype M6 strain 10394 which share 25% sequence identity.

[0763] As also can be seen from Table 45, the amino acid sequences of the four types of main pilus subunits present in GAS are relatively divergent. FIGS. 198-201 provide further tables comparing the percent identity of adhesin island-encoded surface exposed proteins for different GAS serotypes relative to other GAS serotypes harbouring an adhesin island of the same or a different subtype (GAS AI-1, GAS AI-2, GAS AI-3, and GAS AI-4). See also further discussion below.

[0764] Immunizations with the Adhesin Island proteins of the invention are discussed further in the Examples.

### Co-Expression of GBS Adhesin Island Proteins and Role of GBS AI Proteins in Surface Presentation

[0765] In addition to the use of the GBS adhesin island proteins for cross strain and cross serotype protection, Applicants have identified interactions between adhesin island proteins which appear to affect the delivery or presentation of the surface proteins on the surface of the bacteria.

[0766] In particular, Applicants have discovered that surface exposure of GBS 104 is dependent on the concurrent expression of GBS 80. As discussed further in Example 2, reverse transcriptase PCR analysis of AI-1 shows that all of the AI genes are co-transcribed as an operon. Applicants constructed a series of mutant GBS containing in frame deletions of various AI-1 genes. (A schematic of the GBS mutants is presented in FIG. 7). FACS analysis of the various mutants comparing mean shift values using anti-GBS 80 versus anti-GBS 104 antibodies is presented in FIG. 8. Removal of the GBS 80 operon prevented surface exposure of GBS 104; removal of the GBS 104 operon did not affect surface exposure of GBS 80. While not being limited to a specific theory, it is thought that GBS 80 is involved in the transport or localization of GBS 104 to the surface of the bacteria. The two proteins may be oligomerized or otherwise associated. It is possible that this association involves a conformational change in GBS 104 that facilitates its transition to the surface of the GBS bacteria.

[0767] Pili structures that comprise GBS 104 appear to be of a lower molecular weight than pili structures lacking GBS 104. FIG. 68 shows that polyclonal anti-GBS 104 antibodies (see lane marked α-104 POLIC.) cross-hybridize with smaller structures than do polyclonal anti-GBS 80 antibodies (see lane marked α-GBS 80 POLIC.).

[0768] In addition, Applicants have shown that removal of GBS 80 can cause attenuation, further suggesting the protein contributes to virulence. As described in more detail in Example 3, the LD₅₀′s for the Δ80 mutant and the Δ80, Δ104 double mutant were reduced by an order of magnitude compared to wildtype and Δ104 mutant.

[0769] The sortases within the adhesin island also appear to play a role in localization and presentation of the surface proteins. As discussed further in Example 4, FACS analysis of various sortase deletion mutants showed that removal of sortase SAG0648 prevented GBS 104 from reaching the surface and slightly reduced the surface exposure of GBS 80. When sortase SAG0647 and sortase SAG0648 were both knocked out, neither GBS 80 nor GBS 104 were surface exposed. Expression of either sortase alone was sufficient for GBS 80 to arrive at the bacterial surface. Expression of SAG0648, however, was required for GBS 104 surface localization.

[0770] Accordingly, the compositions of the invention may include two or more AI proteins, wherein the AI proteins are physically or chemically associated. For example, the two AI proteins may form an oligomer. In one embodiment, the associated proteins are two AI surface proteins, such as GBS 80 and GBS 104. The associated proteins may be AI surface proteins from different adhesin islands, including host cell adhesin island proteins if the AI surface proteins are expressed in a recombinant system. For example, the associated proteins may be GBS 80 and GBS 67.

Adhesin Island Proteins from Other Gram Positive Bacteria

[0771] Applicants' identification and analysis of the GBS adhesin islands and the immunological and biological functions of these AI proteins and their pilus structures provides insight into similar structures in other Gram positive bacteria.

[0772] As discussed above, “Adhesin Island” or “AI” refers to a series of open reading frames within a bacterial genome that encode for a collection of surface proteins and sortases. An Adhesin Island may encode for amino acid sequences comprising at least one surface protein. The Adhesin Island may encode at least one surface protein. Alternatively, an Adhesin Island may encode for at least two surface proteins and at least one sortase. Preferably, an Adhesin Island encodes for at least three surface proteins and at least two sortases. One or more of the surface proteins may include an LPXTG motif (e.g., SEQ ID NO:122) or other sortase substrate motif. One or more AI surface proteins may participate in the formation of a pilus structure on the surface of the Gram positive bacteria.

[0773] Gram positive adhesin islands of the invention preferably include a divergently transcribed transcriptional regulator. The transcriptional regulator may regulate the expression of the AI operon.

[0774] The invention includes a composition comprising one or more Gram positive bacteria AI surface proteins. Such AI surface proteins may be associated in an oligomeric or hyperoligomeric structure.

[0775] Preferred Gram positive adhesin island proteins for use in the invention may be derived from Staphylococcus (such as S. aureus), Streptococcus (such as S. agalactiae (GBS), S. pyogenes (GAS), S. pneumoniae, S. mutans), Enterococcus (such as E. faecalis and E. faecium), Clostridium (such as C. difficile), Listeria (such as L. monocytogenes) and Corynebacterium (such as C. diphtheria).

[0776] One or more of the Gram positive AI surface protein sequences typically include an LPXTG motif or other sortase substrate motif. Gram positive AI surface proteins of the invention may affect the ability of the Gram positive bacteria to adhere to and invade epithelial cells. AI surface proteins may also affect the ability of Gram positive bacteria to translocate through an epithelial cell layer. Preferably, one or more AI surface proteins are capable of binding to or otherwise associating with an epithelial cell surface. Gram positive AI surface proteins may also be able to bind to or associate with fibrinogen, fibronectin, or collagen.

[0777] Gram positive AI sortase proteins are predicted to be involved in the secretion and anchoring of the LPXTG containing surface proteins. A Gram positive bacteria AI may encode for at least one surface exposed protein. The Adhesin Island may encode at least one surface protein. Alternatively, a Gram positive bacteria AI may encode for at least two surface exposed proteins and at least one sortase. Preferably, a Gram positive AI encodes for at least three surface exposed proteins and at least two sortases.

[0778] Gram positive AI surface proteins may be covalently attached to the bacterial cell wall by membrane-associated transpeptidases, such as an AI sortase. The sortase may function to cleave the surface protein, preferably between the threonine and glycine residues of an LPXTG motif. The sortase may then assist in the formation of an amide link between the threonine carboxyl group and a cell wall precursor such as lipid II. The precursor can then be incorporated into the peptidoglycan via the transglycoslylation and transpeptidation reactions of bacterial wall synthesis. See Comfort et al., Infection & Immunity (2004) 72(5): 2710-2722. Typically, Gram positive bacteria AI surface proteins of the invention will contain an N-terminal leader or secretion signal to facilitate translocation of the surface protein across the bacterial membrane.

[0779] Gram positive bacteria AI surface proteins of the invention may affect the ability of the Gram positive bacteria to adhere to and invade target host cells, such as epithelial cells. Gram positive bacteria AI surface proteins may also affect the ability of the gram positive bacteria to translocate through an epithelial cell layer. Preferably, one or more of the Gram positive AI surface proteins are capable of binding to or other associating with an epithelial cell surface. Further, one or more Gram positive AI surface proteins may bind to fibrinogen, fibronectin, or collagen protein.

[0780] In one embodiment, the invention includes a composition comprising oligomeric, pilus-like structures comprising a Gram positive bacteria AI surface protein. The oligomeric, pilus-like structure may comprise numerous units of the AI surface protein. Preferably, the oligomeric, pilus-like structures comprise two or more AI surface proteins. Still more preferably, the oligomeric, pilus-like structure comprises a hyper-oligomeric pilus-like structure comprising at least two (e.g., 2, 3, 4, 5, 6, 7, 8, 9, 10, 11, 12, 13, 14, 15, 20, 25, 30, 35, 40, 45, 50, 60, 70, 80, 90, 100, 120, 140, 150, 200 or more) oligomeric subunits, wherein each subunit comprises an AI surface protein or a fragment thereof. The oligomeric subunits may be covalently associated via a conserved lysine within a pilin motif. The oligomeric subunits may be covalently associated via an LPXTG motif, preferably, via the threonine amino acid residue.

[0781] Gram positive bacteria AI surface proteins or fragments thereof to be incorporated into the oligomeric, pilus-like structures of the invention will preferably include one or both of a pilin motif comprising a conserved lysine residue and an E box motif comprising a conserved glutamic acid residue.

[0782] The oligomeric, pilus like structures may be used alone or in the combinations of the invention. In one embodiment, the invention comprises a Gram positive bacteria Adhesin Island in oligomeric form, preferably in a hyperoligomeric form.

[0783] The oligomeric, pilus-like structures of the invention may be combined with one or more additional Gram positive AI proteins (from the same or a different Gram positive species or genus). In one embodiment, the oligomeric, pilus-like structures comprise one or more Gram positive bacteria AI surface proteins in combination with a second Gram positive bacteria protein. The second Gram positive bacteria protein may be a known antigen, and need not normally be associated with an AI protein.

[0784] The oligomeric, pilus-like structures may be isolated or purified from bacterial cultures overexpressing a Gram positive bacteria AI surface protein. The invention therefore includes a method for manufacturing an oligomeric Adhesin Island surface antigen comprising culturing a Gram positive bacteria adapted for increased AI protein expression and isolation of the expressed oligomeric Adhesin Island protein from the Gram positive bacteria. The AI protein may be collected from secretions into the supernatant or it may be purified from the bacterial surface. The method may further comprise purification of the expressed Adhesin Island protein. Preferably, the Adhesin Island protein is in a hyperoligomeric form.

[0785] Gram positive bacteria are preferably adapted to increase AI protein expression by at least two (e.g., 2, 3, 4, 5, 8, 10, 15, 20, 25, 30, 35, 40, 45, 50, 60, 70, 80, 90, 100, 125, 150 or 200) times wild type expression levels.

[0786] Gram positive bacteria may be adapted to increase AI protein expression by means known in the art, including methods of increasing gene dosage and methods of gene upregulation. Such means include, for example, transformation of the Gram positive bacteria with a plasmid encoding the AI protein. The plasmid may include a strong promoter or it may include multiple copies of the sequence encoding the AI protein. Optionally, the sequence encoding the AI protein within the Gram positive bacterial genome may be deleted. Alternatively, or in addition, the promoter regulating the Gram positive Adhesin Island may be modified to increase expression.

[0787] The invention further includes Gram positive bacteria which have been adapted to produce increased levels of AI surface protein. In particular, the invention includes Gram positive bacteria which have been adapted to produce oligomeric or hyperoligomeric AI surface protein. In one embodiment, the Gram positive bacteria of the invention are inactivated or attenuated to permit in vivo delivery of the whole bacteria, with the AI surface protein exposed on its surface.

[0788] The invention further includes Gram positive bacteria which have been adapted to have increased levels of expressed AI protein incorporated in pili on their surface. The Gram positive bacteria may be adapted to have increased exposure of oligomeric or hyperoligomeric AI proteins on its surface by increasing expression levels of a signal peptidase polypeptide. Increased levels of a local signal peptidase expression in Gram positive bacteria (such us LepA in GAS) are expected to result in increased exposure of pili proteins on the surface of Gram positive bacteria. Increased expression of a leader peptidase in Gram positive may be achieved by any means known in the art, such as increasing gene dosage and methods of gene upregulation. The Gram positive bacteria adapted to have increased levels of leader peptidase may additionally be adapted to express increased levels of at least one pili protein.

[0789] Alternatively, the AI proteins of the invention may be expressed on the surface of a non-pathogenic Gram positive bacteria, such as Streptococcus gordonii (See, e.g., Byrd et al., “Biological consequences of antigen and cytokine co-expression by recombinant Streptococcus gordonii vaccine vectors, ” Vaccine (2002) 20:2197-2205) or Lactococcus lactis (See, e.g., Mannam et al., “Mucosal Vaccine Made from Live, Recombinant Lactococcus lactis Protects Mice against Pharyngeal Infection with Streptococcus pyogenes” Infection and Immunity (2004) 72(6):3444-3450). It has already been demonstrated, above, that L. lactis expresses GBS and GAS AI polypeptides in oligomeric form and on its surface.

[0790] Alternatively, the oligomeric, pilus-like structures may be produced recombinantly. If produced in a recombinant host cell system, the Gram positive bacteria AI surface protein will preferably be expressed in coordination with the expression of one or more of the AI sortases of the invention. Such AI sortases will facilitate oligomeric or hyperoligomeric formation of the AI surface protein subunits.

[0791] Gram positive AI Sortases of the invention will typically have a signal peptide sequence within the first 70 amino acid residues. They may also include a transmembrane sequence within 50 amino acid residues of the C terminus. The sortases may also include at least one basic amino acid residue within the last 8 amino acids. Preferably, the sortases have one or more active site residues, such as a catalytic cysteine and histidine.

[0792] Adhesin island surface proteins from two or more Gram positive bacterial genus or species may be combined to provide an immunogenic composition for prophylactic or therapeutic treatment of disease or infection of two more Gram positive bacterial genus or species. Optionally, the adhesin island surface proteins may be associated together in an oligomeric or hyperoligomeric structure.

[0793] In one embodiment, the invention comprises an adhesin island surface proteins from two or more Streptococcus species. For example, the invention includes a composition comprising a GBS AI surface protein and a GAS adhesin island surface protein. As another example, the invention includes a composition comprising a GAS adhesin island surface protein and a S. pneumoniae adhesin island surface protein.

[0794] In one embodiment, the invention comprises an adhesin island surface protein from two or more Gram positive bacterial genus. For example, the invention includes a composition comprising a Streptococcus adhesin island protein and a Corynebacterium adhesin island protein.

[0795] Examples of AI sequences in several Gram positive bacteria are discussed further below.

Streptococcus pyogenes (GAS)

[0796] As discussed above, Applicants have identified at least six different GAS Adhesin Islands. These adhesion islands are thought to encode surface proteins which are important in the bacteria's virulence, and Applicants have obtained the first electron micrographs revealing the presence of these adhesin island proteins in hyperoligomeric pilus structures on the surface of Group A Streptococcus.

[0797] Group A Streptococcus is a human specific pathogen which causes a wide variety of diseases ranging from pharyngitis and impetigo through life threatening invasive disease and necrotizing fasciitis. In addition, post-streptococcal autoimmune responses are still a major cause of cardiac pathology in children.

[0798] Group A Streptococcal infection of its human host can generally occur in three phases. The first phase involves attachment and/or invasion of the bacteria into host tissue and multiplication of the bacteria within the extracellular spaces. Generally this attachment phase begins in the throat or the skin. The deeper the tissue level infected, the more severe the damage that can be caused. In the second stage of infection, the bacteria secrete a soluble toxin that diffuses into the surrounding tissue or even systemically through the vasculature. This toxin binds to susceptible host cell receptors and triggers inappropriate immune responses by these host cells, resulting in pathology. Because the toxin can diffuse throughout the host, the necrosis directly caused by the GAS toxins may be physically located in sites distant from the bacterial infection. The final phase of GAS infection can occur long after the original bacteria have been cleared from the host system. At this stage, the host's previous immune response to the GAS bacteria due to cross reactivity between epitopes of a GAS surface protein, M, and host tissues, such as the heart. A general review of GAS infection can be found in Principles of Bacterial Pathogenesis, Groisman ed., Chapter 15 (2001).

[0799] In order to prevent the pathogenic effects associated with the later stages of GAS infection, an effective vaccine against GAS will preferably facilitate host elimination of the bacteria during the initial attachment and invasion stage.

[0800] Isolates of Group A Streptococcus are historically classified according to the M surface protein described above. The M protein is surface exposed trypsin-sensitive protein generally comprising two polypeptide chains complexed in an alpha helical formation. The carboxyl terminus is anchored in the cytoplasmic membrane and is highly conserved among all group A streptococci. The amino terminus, which extends through the cell wall to the cell surface, is responsible for the antigenic variability observed among the 80 or more serotypes of M proteins.

[0801] A second layer of classification is based on a variable, trypsin-resistant surface antigen, commonly referred to as the T-antigen. Decades of epidemiology based on M and T serological typing have been central to studies on the biological diversity and disease causing potential of Group A Streptococci. While the M-protein component and its inherent variability have been extensively characterized, even after five decades of study, there is still very little known about the structure and variability of T-antigens. Antisera to define T types are commercially available from several sources, including Sevapharma (sevapharma.cz/en).

[0802] The gene coding for one form of T-antigen, T-type 6, from an M6 strain of GAS (D741) has been cloned and characterized and maps to an approximately 11 kb highly variable pathogenicity island. Schneewind et al., J Bacteriol. (1990) 172(6):3310-3317. This island is known as the Fibronectin-binding, Collagen-binding T-antigen (FCT) region because it contains, in addition to the T6 coding gene (tee6), members of a family of genes coding for Extra Cellular Matrix (ECM) binding proteins. Bessen et al., Infection & Immunity (2002) 70(3):1159-1167. Several of the protein products of this gene family have been shown to directly bind either fibronectin and/or collagen. See Hanski et al., Infection & Immunity (1992) 60(12):5119-5125; Talay et al., Infection & Immunity (1992(60(9):3837-3844; Jaffe et al. (1996) 12(2):373-384; Rocha et al., Adv Exp Med Biol. (1997) 418:737-739; Kreikemeyer et al., J Biol Chem (2004) 279(16):15850-15859; Podbielski et al., Mol. Microbiol. (1999) 31(4):1051-64; and Kreikemeyer et al., Int. J. Med Microbiol (2004) 294(2-3):177-88. In some cases direct evidence for a role of these proteins in adhesion and invasion has been obtained.

[0803] Applicants raised antiserum against a recombinant product of the tee6 gene and used it to explore the expression of T6 in M6 strain 1553650. In immunoblot of mutanolysin extracts of this strain, the antiserum recognized, in addition to a band corresponding to the predicted molecular mass of the tee6 gene product, very high molecular weight ladders ranging in mobility from about 100 kDa to beyond the resolution of the 3-8% gradient gels used. See FIG. 163A, last lane labeled “M6_Tee6.”

[0804] This pattern of high molecular weight products is similar to that observed in immunoblots of the protein components of the pili identified in Streptococcus agalactiae (described above) and previously in Corynebacterium diphtheriae. Electron microscopy of strain M6 1553650 with antisera specific for the product of tee6 revealed abundant surface staining and long pilus like structures extending up to 700 nanometers from the bacterial surface, revealing that the T6 protein, one of the antigens recognized in the original Lancefield serotyping system, is located within a GAS Adhesin Island (GAS AI-1) and forms long covalently linked pilus structures. See FIG. 163I.

[0805] In addition to the tee6 gene, the FCT region in M6_ISS3650 (GAS AI-1) contains two other genes (prtF1 and cpa) predicted to code for surface exposed proteins; these proteins are characterized as containing the cell wall attachment motif LPXTG. Western blot analysis using antiserum specific for PrtF1 detected a single molecular species with electrophoretic mobility corresponding to the predicted molecular mass of the protein and one smaller band of unknown origin. Western blot analysis using antisera specific for Cpa recognized a high molecular weight covalently linked ladder (FIG. 163A, second lane) Immunogold labelling of Cpa with specific antiserum followed by transmission electron microscopy detected an abundance of Cpa at the cell surface and only occasional structures extending from the cell surface (FIG. 163J).

[0806] Four classes of FCT region can be discerned by the types and order of the genes contained within the region. The FCT region of strains of types M3, M5, M18 and M49 have a similar organization whereas those of M6, M1 and M12 differ. See FIG. 164. As discussed below, these four FCT regions correlate to four GAS Adhesin Island types (AI-1, AI-2, AI-3 and AI-4).

[0807] Applicants discovery of genes coding for pili in the FCT region of strain M6_{—}1553650 prompted them to examine the predicted surface exposed proteins in the variant FCT regions of three other GAS strains of having different M-type (M1_SF370, M5_ISS4883 and M12_{—}20010296) representing the other three FCT variants. Each gene present in the FCT region of each bacteria was cloned and expressed. Antisera specific for each recombinant protein was then used to probe mutanolysin extracts of the respective strains (6). In M1 strain SF370, there are three predicted surface proteins (Cpa (also referred to as M1_{—}126 and GAS 15), M1_{—}128 (a fimbrial protein also referred to as Spy0128 and GAS 16), and M1_{—}130 (also referred to as Spy0130 and GAS 18)) (GAS AI-2). Antisera specific for each surface protein reacted with a ladder of high molecular weight material (FIG. 163B) Immunogold staining of M1 strain SF370 with antiserum specific for M1_{—}128 revealed pili structures similar to those seen when M6 strain ISS3650 was immunogold stained with antiserum specific for tee6 (See FIG. 1163K). Antisera specific for surface proteins Cpa and M1_{—}130 revealed abundant surface staining and occasional structures extending from the surface of M1 strain SF370 bacteria (FIG. 163S).

[0808] The M1_{—}128 protein appears to be necessary for polymerization of Cpa and M1_{—}130 proteins. If the M1_{—}128 gene in M1_SF370 was deleted, Western blot analysis using antibodies that hybridize to Cpa and M1_{—}130 no longer detected high molecular weight ladders comprising the Cpa and M1_{—}130 proteins (FIG. 163E). See also FIGS. 177A-C which provide the results of Western blot analysis of the M1_{—}128 (Δ128) deleted bacteria using anti-M1_{—}130 antiserum (FIG. 177A), anti-M1_{—}128 antiserum (FIG. 177B), and anti-M1_{—}126 antiserum (FIG. 177C). High molecular weight ladders, indicative of pilus formation on the surface of M1 strain SF370, could not be detected by any of the three antisera in Δ128 bacteria. If the Δ128 bacteria were transformed with a plasmid containing the gene for M1_{—}128, Western blot analysis using antisera specific for Cpa and M1_{—}130 again detected high molecular weight ladders (FIG. 163H).

[0809] In agreement with the Western blot analysis, immunoelectron microscopy failed to detect pilus assembly on the Δ128 strain SF370 bacteria using M1_{—}128 antisera (FIG. 178B). Although Δ128 SF370 bacteria were unable to form pili, M1_{—}126 (cpa) and M1_{—}130, which contain sortase substrate motifs, were present on the bacteria's surface. FACS analysis of the M1_{—}128 deleted (Δ128) strain SF370 bacteria also detected both M1_{—}126 and M1_{—}130 on the surface of the Δ128 strain SF370 bacteria. See FIGS. 179D and F, which show a shift in fluorescence when antibodies immunoreactive to M1_{—}126 and M1_{—}130 are used on Δ128 bacteria. As expected, virtually no shift in fluorescence is observed when antibodies immunoreactive to M1_{—}128 are used with the Δ128 bacteria (FIG. 179E).

[0810] By contrast, deletion of the M1_{—}130 gene did not effect polymerization of M1_{—}128 (FIG. 163F). See also FIGS. 177A-C, which provide Western blot analysis results of the M1_{—}130 deleted (Δ130) strain SF370 bacteria using anti-M1_{—}130 (FIG. 177A), anti-M1_{—}128 (FIG. 177B), and anti-M1_{—}126 antiserum (FIG. 177C). The anti-M1_{—}128 and anti-M1_{—}126 antiserum both detected the presence of high molecular weight ladders in the Δ130 strain SF370 bacteria, indicating that the Δ130 bacteria form pili that comprise M1_{—}126 and M1_{—}128 polypeptides in the absence of M1_{—}130. As expected, the Western blot probed with antiserum immunoreactive with M1_{—}130 did not detect any proteins for the Δ130 bacteria (FIG. 177A).

[0811] Hence, the composition of the pili in GAS resembles that previously described for both C. diphtheria (7, 8) and S. agalactiae (described above) (9) in that each pilus is formed by a backbone component which abundantly stains the pili in EM and is essential for the incorporation of the other components.

[0812] Also similar to C. diphtheria, elimination of the srtC1 gene from the FCT region of M1_SF370 abolished polymerization of all three proteins and assembly of pili (FIG. 163G). See also FIGS. 177A-C, which provide Western blot analysis of the SrtC1 deleted (ASrtC1) strain SF370 bacteria using anti-M1_{—}130 (FIG. 177A), anti-M1_{—}128 (FIG. 177B), and anti-M1_{—}126 antiserum (FIG. 177C). None of the three antisera immunoreacted with high molecular weight structures (pili) in the ΔSrtC1 bacteria. Confirming that deletion of the SrtC1 gene abrogates pilus assembly in strain SF370, immunoelectron microscopy using antisera against M1_{—}128 failed to detect pilus formation on the bacteria surface. See FIG. 178C. Although no assembled pili were detected on ΔSrtC1 SF370, M1_{—}128 proteins could be detected on the surface of SF370. Thus, it appeared that SrtC1 deletion prevented pilus assembly on the surface of the SF370 bacteria, but not anchoring of the proteins that comprise pili to the bacterial cell wall. FACS analysis of the ΔSrtC1 strain SF370 confirmed that deletion of SrtC1 does not eliminate cell surface expression of M1_{—}126, M1_{—}128 or M1_{—}130. See FIG. 179G-I, which show a shift in fluorescence when antibodies immunoreactive to M1_{—}126 (FIG. 179G), M1_{—}128 (FIGS. 179H), and M1_{—}130 (FIG. 179I) are used to detect cell surface protein expression on ΔSrtC1 bacteria. Thus, SrtC1 deletion prevents pilus formation, but not surface anchoring of proteins involved in pilus formation on the surface of bacteria. Another sortase is possibly involved in anchoring of the proteins to the bacteria surface. Pilus polymerization in C. diphtheriae is also dependent on particular sortase enzyme whose gene resides at the same genetic locus as the pilus components (7, 8).

[0813] The LepA signal peptidase, Spy0127, also appears to be essential for pilus assembly in strain SF370. LepA deletion mutants (ΔLepA) of strain SF370 fail to assemble pili on the cell surface. Not only are the ΔLepA mutants unable to assemble pili, they are also deficient at cell surface M1 expression. See FIG. 180, which provides a FACS analysis of the wildtype (A) and ALepA mutant (B) SF370 bacteria using M1 antisera. No shift in fluorescence is observed for the ΔLepA mutant bacteria in the presence of M1 immune serum. It is possible that these deletion mutants of LepA will be useful for detecting non-M, non-pili, surface exposed antigens on the surface of GAS, or any Gram positive bacteria. These antigens may also be useful in immunogenic compositions.

[0814] Pili were also observed in M5 strain ISS4882 and M12 strain 20010296. The M5 strain ISS4882 contains genes for four predicted surface exposed proteins (GAS AI-3). Antisera against three of the four products of the FCT region (GAS AI-3) of M5_ISS4883 (Cpa, M5_orf80, M5_orf82) stained high molecular weight ladders in Western blot analysis (FIG. 163C). Long pili were visible when antisera against M5_orf80 was used in immunogold staining followed by electron microscopy (FIG. 163L).

[0815] The M12 strain 20010296 contains genes for five predicted surface exposed proteins. (GAS AI-4) Antisera against three of the five products of the FCT region (GAS AI-4) of M12_{—}20010296 (Cpa, EftLSL.A, Orf2) stained high molecular weight ladders in Western blot analysis (FIG. 163D). Long pili were visible when antisera against EftLSL.A were used (FIG. 163M).

[0816] The major pilus forming proteins identified in the four strains studied by applicants (T6, M1_{—}128, M5_orf80 and EftLSL.A) share between 23% and 65% amino acid identity in any pairwise comparison, indicating that each pilus may represent a different Lancefield T-antigen. Each pilus is part of a trypsin resistant structure on the GAS bacteria surface, as is the case for the Lancefield T antigens. See FIG. 165, which provides a FACS analysis of bacteria harboring each of the FCT types that had or had not been treated with trypsin (6). Following treatment, surface expression of the pilus proteins was assayed by indirect immunofluorescence and flow cytometry using antibodies specific for the pilus proteins, the bacteria's respective M proteins, or surface proteins not associated with the pili (FIG. 165). Staining the cells with sera specific for proteins associated with the pili was not effected by trypsin treatment, whereas trypsin treatment substantially reduced detection of M-proteins or surface proteins not associated with pili.

[0817] The pili structures identified on the surface of the GAS bacteria were confirmed to be Lancefield T antigens when commercially available T-serotyping sera detected the pili on the surface of bacteria. Western blot analysis was initially performed to determine if polyvalent serum pools (designated T, U, W, X, and Y) could detect recombinant proteins for each of the major pilus components (T6, M1_{—}128, M5_orf80 and EftLSL.A) identified in the strains of bacteria discussed above. Pool U, which contains the T6 serum, recognized the T6 protein specifically (a surface exposed pilus protein from GAS AI-1)(FIG. 166B). Pool T specifically recognized M1_{—}128 (a surface exposed pilus protein from GAS AI-2) (FIG. 166A). Pool W recognized both M5_orf80 and EftLSL.A (FIG. 166C). Using monovalent sera representative of each of the components of each polyvalent pool, applicants confirmed the specificity of the T6 antigen (corresponding to a surface exposed pilus protein from GAS AI-1)(FIG. 166E) and identified M1_{—}128 as antigen T1 (corresponding to a surface exposed pilus protein from GAS AI-2) (FIG. 166D), EftLSL.A as antigen T12 (corresponding to a surface exposed pilus protein from GAS AI-4) (FIGS. 166G) and M5_orf80 as a common antigen recognized by the related sera T5, T27 and T44 (corresponding to a surface exposed pilus protein from GAS AI-3).

[0818] Confirming applicants observations, discussed above, that deleting the M1_{—}128 gene from M1_SF370 abolishes pilus formation, the pool T sera stained whole M1_SF370 bacteria (FIG. 166H) but failed to stain M1_SF370 bacteria lacking the M1_{—}128 gene (FIG. 166I).

[0819] As discussed above, Applicants have identified at least six different Group A Streptococcus Adhesin Islands. While these GAS AI sequences can be identified in numerous M types, Applicants have surprisingly discovered a correlation between the four main pilus subunits from the four different GAS AI types and specific T classifications. While other trypsin-resistant surface exposed proteins are likely also implicated in the T classification designations, the discovery of the role of the GAS adhesin islands (and the associated hyper-oligomeric pilus like structures) in T classification and GAS serotype variance has important implications for prevention and treatment of GAS infections. Applicants have identified protein components within each of the GAS adhesin islands which are associated with the pilus formation. These proteins are believed to be involved in the bacteria's initial adherence mechanisms Immunological recognition of these proteins may allow the host immune response to slow or prevent the bacteria's transition into the more pathogenic later stages of infection. In addition, the GAS pili may be involved in formation of biofilms. Applicants have discovered that the GBS pili structures appear to be implicated in the formation of biofilms (populations of bacteria growing on a surface, often enclosed in an exopolysaccharide matrix). Biofilms are generally associated with bacterial resistance, as antibiotic treatments and host immune response are frequently unable to eradicate all of the bacteria components of the biofilm. Direction of a host immune response against surface proteins exposed during the first steps of bacterial attachment (i.e., before complete biofilm formation) is preferable.

[0820] The invention therefore provides for improved immunogenic compositions against GAS infection which may target GAS bacteria during their initial attachment efforts to the host epithelial cells and may provide protection against a wide range of GAS serotypes. The immunogenic compositions of the invention include GAS AI surface proteins which may be formulated in an oligomeric, or hyperoligomeric (pilus) form. The invention also includes combinations of GAS AI surface proteins. Combinations of GAS AI surface proteins may be selected from the same adhesin island or they may be selected from different GAS adhesin islands.

[0821] The invention comprises compositions comprising a first GAS AI protein and a second GAS AI protein wherein the first and second GAS AI proteins are derived from different GAS adhesin islands. For example, the invention includes a composition comprising at least two GAS AI proteins wherein the GAS AI proteins are encoded by the adhesin islands selected from the group consisting of GAS AI-1 and AI-2; GAS AI-1 and GAS AI-3; GAS AI-1 and GAS AI-4; GAS AI-2 and GAS AI-3; GAS AI-2 and GAS AI-4; and GAS AI-3 and GAS AI-4. Preferably the two GAS AI proteins are derived from different T-types.

[0822] A schematic arrangement of GAS Adhesin Island sequences is set forth in FIG. 162. In all strains, the AI region is flanked by the highly conserved open reading frames M1_{—}123 and M1-136. Between three and five genes in each locus code for surface proteins containing LPXTG motifs. These surface proteins also all belong to the family of genes coding for ECM binding adhesins.

[0823] Adhesin island sequences can be identified in numerous M types of Group A Streptococcus. Examples of AI sequences within M1, M6, M3, M5, M12, M18, and M49 serotypes are discussed below.

[0824] GAS Adhesin Islands generally include a series of open reading frames within a GAS genome that encode for a collection of surface proteins and sortases. A GAS Adhesin Island may encode for amino acid sequences comprising at least one surface protein. Alternatively, a GAS Adhesin Island may encode for at least two surface proteins and at least one sortase. Preferably, a GAS Adhesin Island encodes for at least three surface proteins and at least two sortases. One or more of the surface proteins may include an LPXTG motif (e.g., SEQ ID NO:122) or other sortase substrate motif. One or more GAS AI surface proteins may participate in the formation of a pilus structure on the surface of the Gram positive bacteria.

[0825] GAS Adhesin Islands of the invention preferably include a divergently transcribed transcriptional regulator. The transcriptional regulator may regulate the expression of the GAS AI operon. Examples of transcriptional regulators found in GAS AI sequences include RofA and Nra.

[0826] The GAS AI surface proteins may bind or otherwise adhere to fibrinogen, fibronectin, or collagen. One or more of the GAS AI surface proteins may comprise a fimbrial structural subunit.

[0827] One or more of the GAS AI surface proteins may include an LPXTG motif or other sortase substrate motif. The LPXTG motif may be followed by a hydrophobic region and a charged C terminus, which are thought to retard the protein in the cell membrane to facilitate recognition by the membrane-localized sortase. See Barnett, et al., J. Bacteriology (2004) 186 (17): 5865-5875.

[0828] GAS AI sequences may be generally categorized as Type 1, Type 2, Type 3, or Type 4, depending on the number and type of sortase sequences within the island and the percentage identity of other proteins (with the exception of RofA and cpa) within the island. FIG. 167 provides a chart indicating the number and type of sortase sequences identified within the adhesin islands of various strains and serotypes of GAS. As can be seen in this FIG., all GAS strains and serotypes thus far characterized as an AI-1 have a SrtB type sortase, all GAS strains and serotypes thus far characterized as an AI-2 have SrtB and SrtC1 type sortases, all GAS strains and serotypes thus far characterized as an AI-3 have a SrtC2 type sortase, and all GAS strains and serotypes thus far characterized as an AI-4 have SrtB and SrtC2 type sortases. A comparison of the percentage identity of sequences within the adhesin islands was presented in Table 45, see above.

[0829] (1) Adhesin Island Sequence Within M6: GAS Adhesin Island 1 (“GAS AI-1”)

[0830] A GAS Adhesin Island within M6 serotype (MGAS10394) is outlined in Table 4 below. This GAS adhesin island 1 (“GAS AI-1”) comprises surface proteins, a srtB sortase and a rofA divergently transcribed transcriptional regulator.

[0831] GAS AI-1 surface proteins include Spy0157 (a fibronectin binding protein), Spy0159 (a collagen adhesion protein) and Spy0160 (a fimbrial structural subunit). Preferably, each of these GAS AI-1 surface proteins includes an LPXTG sortase substrate motif, such as LPXTG (SEQ ID NO:122) or LPXSG (SEQ ID NO:134) (conservative replacement of threonine with serine).

[0832] GAS AI-1 includes a srtB type sortase. GAS srtB sortases may preferably anchor surface proteins with an LPSTG motif (SEQ ID NO:166), particularly where the motif is followed by a serine.

TABLE 4
GAS AI-1 sequences from M6 isolate (MGAS10394)

| | Sortase | |
|---|---|---|
| AI-1 | substrate | |
| sequence | sequence or | |
| identifier | sortase type | functional description |
| M6_Spy0156 | | Transcriptional regulator (rofA) |
| M6_Spy0157 | LPXTG | Fibronectin-binding protein |
| M6_Spy0158 | | Reverse transcriptase |
| M6_Spy0159 | LPXSG | Collagen adhesion protein |
| M6_Spy0160 | LPXTG | Fimbrial structural subunit |
| M6_Spy0161 | srtB | Sortase |

[0833] M6_Spy0160 appears to be present on the surface of GAS as part of oligomeric (pilus) structures. FIGS. 127-132 present electron micrographs of GAS serotype M6 strain 3650 immunogold stained for M6_Spy0160 using anti-M6_Spy0160 antiserum. Oligomeric or hyperoligomeric structures labelled with gold particles can be seen extending from the surface of the GAS in each of these FIGS., indicating the presence of multiple M6_Spy0160 polypeptides in the oligomeric or hyperoligomeric structures. FIG. 176A-F present electron micrographs of GAS M6 strain 2724 immunogold stained for M6_Spy0160 using anti-M6_Spy0160 antiserum (FIGS. 176A-E) or immunogold stained for M6_Spy0159 using anti-M6_Spy0159 antiserum (FIG. 176F). Oligomeric or hyperoligomeric structures labelled with gold particles can again be seen extending from the surface of the M6 strain 2724 GAS bacteria immunogold stained for M6_Spy0160. M6_Spy0159 is also detected on the surface of the M6 strain 2724 GAS.

[0834] FACS analysis has confirmed that the GAS AI-1 surface proteins spyM6_{—}0159 and spyM6_{—}0160 are indeed expressed on the surface of GAS. FIG. 73 provides the results of FACS analysis for surface expression of spyM6_{—}0159 on each of GAS serotypes M6 2724, M6 3650, and M6 2894. A shift in fluorescence is observed for each GAS serotype when anti-spyM6_{—}0159 antiserum is present, demonstrating cell surface expression. Table 18, below, quantitatively summarizes the FACS fluorescence values obtained for each GAS serotype in the presence of pre-immune antiserum, anti-spyM6_{—}0159 antiserum, and the difference in fluorescence value between the pre-immune and anti-spyM6_{—}0159 antiserum.

TABLE 18
Summary of FACS values for surface expression of spyM6_0159

| 2724 | | | 3650 | | | 2894 | | |
|---|---|---|---|---|---|---|---|---|
| Pre- | Anti- | | Pre- | Anti- | | Pre- | Anti- | |
| immune | spyM6_0159 | Change | immune | spyM6_0159 | Change | immune | spyM6_0159 | Change |
| 134.84 | 427.48 | 293 | 149.68 | 712.62 | 563 | 193.86 | 597.8 | 404 |

[0835] FIG. 74 provides the results of FACS analysis for surface expression of spyM6_{—}0160 on each of GAS serotypes M6 2724, M6 3650, and M6 2894. In the presence of anti-spyM6_{—}0160 antiserum, a shift in fluorescence is observed for each GAS serotype, which demonstrates its cell surface expression. Table 19, below, quantitatively summarizes the FACS fluorescence values obtained for each GAS serotype in the presence of pre-immune antiserum, anti-spyM6_{—}0160 antiserum, and the change in fluorescence value between the pre-immune and anti-spyM6_{—}0160 antiserum.

TABLE 19
Summary of FACS values for surface expression of spyM6_0160

| 2724 | | | 3650 | | | 2894 | | |
|---|---|---|---|---|---|---|---|---|
| Pre- | Anti- | | Pre- | Anti- | | Pre- | Anti- | |
| immune | spyM6_0160 | change | immune | spyM6_0160 | change | immune | spyM6_0160 | change |
| 117.12 | 443.24 | 326 | 128.57 | 776.39 | 648 | 125.87 | 621.17 | 495 |

[0836] Surface expression of M6_Spy0159 and M6_Spy0160 on M6 serotype GAS has also been confirmed by Western blot analysis. FIG. 98 shows that while pre-immune sera (P α-0159) does not detect expression of M6_Spy0159 in GAS serotype M6, anti-M6_Spy0159 immune sera (I α-0159) is able to detect M6_Spy0159 protein in both total GAS M6 extracts (M6 tot) and GAS M6 fractions enriched for cell surface proteins (M6 surf prot). The M6_Spy0159 proteins detected in the total GAS M6 extracts or the GAS M6 extracts enriched for surface proteins are also present as high molecular weight structures, indicating that M6_Spy0159 may be in an oligomeric (pilus) form.

[0837] FIG. 112 shows that while preimmune sera (Preimmune Anti 106) does not detect expression of M6_Spy0160 in GAS serotype M6 strain 2724, anti-M6_Spy0160 immune sera (Anti 160) does in both total GAS M6 strain 2724 extracts (M6 2724 tot) and GAS M6 strain 2724 fractions enriched for surface proteins. The M6_Spy0160 proteins detected in the total GAS M6 strain 2724 extracts or the GAS M6 strain 2724 extracts enriched for surface proteins are also present as high molecular weight structures, indicating that M6_Spy0160 may be in an oligomeric (pilus) form.

[0838] FIGS. 110 and 111 both further verify the presence of M6_Spy0159 and M6_Spy0160 in higher molecular weight structures on the surface of GAS. FIG. 110 provides a Western blot performed to detect M6_Spy0159 and M6_Spy0160 in GAS M6 strain 2724 extracts enriched for surface proteins. Antiserum raised against either M6_Spy0159 (Anti-159) or M6_Spy0160 (Anti-160) cross-hybridizes with high molecular weight structures (pili) in these extracts. FIG. 111 provides a similar Western blot that verifies the presence of M6_Spy0159 and M6_Spy0160 in high molecular weight structures in GAS M6 strain 3650 extracts enriched for surface proteins.

[0839] SpyM6_{—}0157 (a fibronectin-binding protein) may also be expressed on the surface of GAS serotype M6 bacteria. FIG. 174 shows the results of FACS analysis for surface expression of spyM6_{—}0157 on M6 strain 3650. A slight shift in fluorescence is observed, which demonstrates that some spyM6_{—}0157 may be expressed on the GAS cell surface.

### Adhesin Island Sequence Within M6: GAS Adhesin Island 2 (“GAS AI-2”)

[0840] A GAS Adhesin Island within M1 serotype (SF370) is outlined in Table 5 below. This GAS adhesin island 2 (“GAS AI-2”) comprises surface proteins, a SrtB sortase, a SrtC1 sortase and a RofA divergently transcribed transcriptional regulator.

[0841] GAS AI-2 surface proteins include GAS 15 (Cpa), Spy0128 (thought to be a fimbrial protein) and Spy0130 (a hypothetical protein). Preferably, each of these GAS AI-2 surface proteins includes an LPXTG sortase substrate motif, such as LPXTG (SEQ ID NO:122), VVXTG (SEQ ID NO:135), or EVXTG (SEQ ID NO:136).

[0842] GAS AI-2 includes a srtB type sortase and a srtC1 sortase. As discussed above, GAS SrtB sortases may preferably anchor surface proteins with an LPSTG (SEQ ID NO:166) motif, particularly where the motif is followed by a serine. GAS SrtC1 sortase may preferentially anchor surface proteins with a V(P/V)PTG (SEQ ID NO:167) motif. GAS SrtC1 may be differentially regulated by RofA.

[0843] GAS AI-2 may also include a LepA putative signal peptidase I protein.

TABLE 5
GAS AI-2 sequence from M1 isolate (SF370)

| | Sortase | |
|---|---|---|
| AI-2 | substrate | |
| sequence | sequence or | |
| identifier | sortase type | functional description |
| SPy0124 | | rofA regulatory protein |
| GAS15(not annotated | VVXTG | cpa |
| in SF370) | | |
| SPy0127 | | LepA putative signal peptidase I |
| SPy0128 (GAS16) | EVXTG | hypothetical protein (fimbrial) |
| SPy0129 (GAS17) | srtC1 | sortase |
| SPy0130 (GAS18) | LPXTG | hypothetical protein |
| SPy0131 | | conserved hypothetical protein |
| SPy0133 | | conserved hypothetical protein |
| SPy0135 (GAS20) | srtB | sortase (putative fimbrial- |
| | | associated protein) |

[0844] GAS 15, GAS 16, and GAS 18 appear to be present on the surface of GAS as part of oligomeric (pilus) structures. FIGS. 113-115 present electron micrographs of GAS serotype M1 strain SF370 immunogold stained for GAS 15 using anti-GAS 15 antiserum. FIGS. 116-121 provide electron micrographs of GAS serotype M1 strain SF370 immunogold stained for GAS 16 using anti-GAS 16 antiserum. FIGS. 122-125 present electron micrograph of GAS serotype M1 strain SF370 immunogold stained for GAS 18 using anti-GAS 18 antiserum. Oligomers of these proteins can be seen on the surface of SF370 bacteria in the immuno-gold stained micrographs.

[0845] FIG. 126 reveals a hyperoligomer on the surface of a GAS serotype M1 strain SF370 bacterium immunogold stained for GAS 18. This long hyperoligomeric structure comprising GAS 18 stretches far out into the supernatant from the surface of the bacteria.

[0846] FACS analysis has confirmed that the GAS AI-2 surface proteins GAS 15, GAS 16, and GAS 18 are expressed on the surface of GAS. FIG. 75 provides the results of FACS analysis for surface expression of GAS 15 on each of GAS serotypes M1 2719, M1 2580, M1 3280, M1 SF370, M1 2913, and M1 3348. A shift in fluorescence is observed for each GAS serotype when anti-GAS 15 antiserum is present, demonstrating cell surface expression. Table 20, below, quantitatively summarizes the FACS fluorescence values obtained for each GAS serotype in the presence of pre-immune antiserum, anti-GAS 15 antiserum, and the difference in fluorescence value between the pre-immune and anti-GAS 15 antiserum.

TABLE 20
Summary of FACS values for surface expression of GAS 15

| Pre- | Anti-GAS | | Pre- | Anti-GAS | | Pre- | Anti-GAS | |
|---|---|---|---|---|---|---|---|---|
| immune | 15 | Change | immune | 15 | Change | immune | 15 | Change |
| 2719 | | | 2580 | | | 3280 | | |
| 159.46 | 712.71 | 553 | 123.9 | 682.84 | 559 | 217.02 | 639.69 | 423 |
| SF370 | | | 2913 | | | 3348 | | |
| 201.93 | 722.68 | 521 | 121.41 | 600.45 | 479 | 152.09 | 446.41 | 294 |

[0847] FIGS. 76 and 79 provide the results of FACS analysis for surface expression of GAS 16 on each of GAS serotypes M1 2719, M1 2580, M1 3280, M1 SF370, M1 2913, and M1 3348. The FACS data in FIG. 76 was obtained using antisera was raised against full length GAS 16. In the presence of this anti-GAS 16 antiserum, a shift in fluorescence is observed for each GAS serotype, demonstrating its cell surface expression. Table 21, below, quantitatively summarizes the FACS fluorescence values obtained for each GAS serotype in the presence of pre-immune antiserum, anti-GAS 16 antiserum, and the change in fluorescence value between the pre-immune and anti-GAS 16 antiserum.

TABLE 21
Summary of FACS values for surface expression of GAS 16

| Pre- | Anti-GAS | | Pre- | Anti-GAS | | Pre- | Anti-GAS | |
|---|---|---|---|---|---|---|---|---|
| immune | 16 | Change | immune | 16 | Change | immune | 16 | Change |
| 2719 | | | 2580 | | | 3280 | | |
| 233.27 | 690.09 | 457 | 133.82 | 732.29 | 598 | 264.47 | 649.43 | 385 |
| SF370 | | | 2913 | | | 3348 | | |
| 237.2 | 727.46 | 490 | 138.52 | 588.04 | 450 | 180.56 | 420.93 | 240 |

[0848] The FACS data in FIG. 79 was obtained using antisera was raised against a truncated GAS 16, which is encoded by SEQ ID NO:179, shown below.

SEQ ID NO: 179:
GCTACAACAGTTCACGGGGAGACTGTTGTAAACGGAGCCAAACTAACAGT
TACAAAAAACCTTGATTTAGTTAATAGCAATGCATTAATTCCAAATACAG
ATTTTACATTTAAAATCGAACCTGATACTACTGTCAACGAAGACGGAAAT
AAGTTTAAAGGTGTAGCTTTGAACACACCGATGACTAAAGTCACTTACAC
CAATTCAGATAAAGGTGGATCAAATACGAAAACTGCAGAATTTGATTTTT
CAGAAGTTACTTTTGAAAAACCAGGTGTTTATTATTACAAAGTAACTGAG
GAGAAGATAGATAAAGTTCCTGGTGTTTCTTATGATACAACATCTTACAC
TGTTCAAGTTCATGTCTTGTGGAATGAAGAGCAACAAAAACCAGTAGCTA
CTTATATTGTTGGTTATAAAGAAGGTAGTAAGGTGCCAATTCAGTTCAAA
AATAGCTTAGATTCTACTACATTAACGGTGAAGAAAAAAGTTTCAGGTAC
CGGTGGAGATCGCTCTAAAGATTTTAATTTTGGTCTGACTTTAAAAGCAA
ATCAGTATTATAAGGCGTCAGAAAAAGTCATGATTGAGAAGACAACTAAA
GGTGGTCAAGCTCCTGTTCAAACAGAGGCTAGTATAGATCAACTCTATCA
TTTTACCTTGAAAGATGGTGAATCAATCAAAGTCACAAATCTTCCAGTAG
GTGTGGATTATGTTGTCACTGAAGACGATTACAAATCAGAAAAATATACA
ACCAACGTGGAAGTTAGTCCTCAAGATGGAGCTGTAAAAAATATCGCAGG
TAATTCAACTGAACAAGAGACATCTACTGATAAAGATATGACCATTACTT
TTACAAATAAAAAAGATTT

[0849] In the presence of this anti-GAS 16 antiserum, a shift in fluorescence is observed for each GAS serotype, demonstrating its cell surface expression. Table 22, below, quantitatively summarizes the FACS fluorescence values obtained for each GAS serotype in the presence of pre-immune antiserum, anti-GAS 16 antiserum, and the change in fluorescence value between the pre-immune and anti-GAS 16 antiserum.

TABLE 22
Summary of FACS values for surface expression of GAS 16 using a second antisera

| Pre- | Anti-GAS | | Pre- | Anti-GAS | | Pre- | Anti-GAS | |
|---|---|---|---|---|---|---|---|---|
| immune | 16 | Change | immune | 16 | Change | immune | 16 | Change |
| 2719 | | | 2580 | | | 3280 | | |
| 141.55 | 650.22 | 509 | 119.57 | 672.35 | 553 | 209.18 | 666.71 | 458 |
| SF370 | | | 2913 | | | 3348 | | |
| 159.92 | 719.32 | 559 | 115.97 | 585.9 | 470 | 146.1 | 414.01 | 268 |

[0850] FIGS. 77 and 78 provide the results of FACS analysis for surface expression of GAS 18 on each of GAS serotypes M1 2719, M1 2580, M1 3280, M1 SF370, M1 2913, and M1 3348. The antiserum used to obtain the FACS data in each of FIGS. 77 and 78 was different, although each was raised against full length GAS 18. In the presence of each of the anti-GAS 18 antisera, a shift in fluorescence is observed for each GAS serotype, demonstrating its cell surface expression. Tables 23 and 24, below, quantitatively summarizes the FACS fluorescence values obtained for each GAS serotype in the presence of pre-immune antiserum, first or second anti-GAS 18 antiserum, and the change in fluorescence value between the pre-immune and first or second anti-GAS 18 antiserum.

TABLE 23
Summary of FACS values for surface expression of GAS 18

| Pre- | Anti-GAS | | Pre- | Anti-GAS | | Pre- | Anti-GAS | |
|---|---|---|---|---|---|---|---|---|
| immune | 18 | Change | immune | 18 | Change | immune | 18 | Change |
| 2719 | | | 2580 | | | 3280 | | |
| 135.68 | 327.98 | 192 | 116.32 | 379.41 | 263 | 208.12 | 380.84 | 173 |
| SF370 | | | 2913 | | | 3348 | | |
| 185.39 | 438.23 | 253 | 119.95 | 373.32 | 253 | 147.12 | 266.51 | 119 |

TABLE 24
Summary of FACS values for surface expression of GAS 18 using a second antisera

| Pre- | Anti-GAS | | Pre- | Anti-GAS | | Pre- | Anti-GAS | |
|---|---|---|---|---|---|---|---|---|
| immune | 18 | Change | immune | 18 | Change | immune | 18 | Change |
| 2719 | | | 2580 | | | 3280 | | |
| 150.4 | 250.39 | 100 | 139.18 | 386.38 | 247 | 253.38 | 347.72 | 94 |
| SF370 | | | 2913 | | | 3348 | | |
| 188.64 | 373.11 | 184 | 124.94 | 384.82 | 260 | 168.8 | 213.65 | 45 |

[0851] Surface expression of GAS 15, GAS 16, and GAS 18 on M1 serotype GAS has also been confirmed by Western blot analysis. FIG. 89 shows that while pre-immune sera does not detect GAS M1 expression of GAS 15, anti-GAS 15 immune sera is able to detect GAS 15 protein in both total GAS M1 extracts and GAS M1 proteins enriched for cell surface proteins. The GAS 15 proteins detected in the M1 extracts enriched for surface proteins are also present as high molecular weight structures, indicating that GAS 15 may be in an oligomeric (pilus) form. FIG. 90 also shows the results of Western blot analysis of M1 serotype GAS using anti-GAS 15 antisera. Again, the lanes that contain GAS M1 extracts enriched for surface proteins (M1 prot sup) show the presence of high molecular weight structures that may be oligomers of GAS 15. FIG. 91 provides an additional Western blot identical to that of FIG. 90, but that was probed with pre-immune sera. As expected, no proteins were detected on this membrane.

[0852] FIG. 92 provides a Western blot that was probed for GAS 16 protein. While pre-immune sera does not detect GAS M1 expression of GAS 16, anti-GAS 16 immune sera is able to detect GAS 16 protein in GAS M1 extracts enriched for cell surface proteins. The GAS 16 proteins detected in the M1 extracts enriched for surface proteins are present as high molecular weight structures, indicating that GAS 16 may be in an oligomeric (pilus) form. FIG. 93 also shows the results of Western blot analysis of M1 serotype GAS using anti-GAS 16 antisera. The lanes that contain total GAS M1 protein (M1 tot new and M1 tot old) and the lane that contains GAS M1 extracts enriched for surface proteins (M1 prot sup) show the presence of high molecular weight structures that may be oligomers of GAS 16. FIG. 94 provides an additional Western blot identical to that of FIG. 93, but that was probed with pre-immune sera. As expected, no proteins were detected on this membrane.

[0853] FIG. 95 provides a Western blot that was probed for GAS 18 protein. While pre-immune sera does not detect GAS M1 expression of GAS 18, anti-GAS 18 immune sera is able to detect GAS 18 protein in GAS M1 extracts enriched for cell surface proteins. The GAS 18 proteins detected in the M1 extracts enriched for surface proteins are present as high molecular weight structures, indicating that GAS 18 may be in an oligomeric (pilus) form. FIG. 96 also shows the results of Western blot analysis of M1 serotype GAS using anti-GAS 18 antisera. The lane that contains GAS M1 extracts enriched for surface proteins (M1 prot sup) show the presence of high molecular weight structures that may be oligomers of GAS 18. FIG. 97 provides an additional Western blot identical to that of FIG. 96, but that was probed with pre-immune sera. As expected, no proteins were detected on this membrane.

[0854] FIGS. 102-106 provide additional Western blots to verify the presence of GAS 15, GAS 16, and GAS 18 in high molecular weight structures in GAS. Each Western blot was performed using proteins from a different GAS M1 strain, 2580, 2913, 3280, 3348, and 2719. Each Western blot was probed with antisera raised against each of GAS 15, GAS 16, and GAS 18. As can be seen in FIGS. 102-106, none of the Western blots shows detection of proteins using pre-immune serum (Pα-158, Pα-15, Pα-16, or Pα-18), while each Western blot shows cross-hybridization of the GAS 15 (Iα-15), GAS 16 (Iα-16), and GAS 18 (Iα-18) antisera to high molecular weight structures. Thus, these Western blots confirm that GAS 15, GAS 16, and GAS 18 can be present in pili in GAS M1.

[0855] FIG. 107 provides a similar Western blot performed to detect GAS 15, GAS 16, and GAS 18 proteins in a GAS serotype M1 strain SF370 protein fraction enriched for surface proteins. This Western blot also shows detection of GAS 15 (Anti-15), GAS 16 (Anti-16), and GAS 18 (Anti-18) as high molecular weight structures.

[0856] (3) Adhesin Island Sequence Within M3, M5, and M18: GAS Adhesin Island 3 (“GAS AI-3”)

[0857] GAS Adhesin Island sequences within M3, M5, and M18 serotypes are outlined in Tables 6-8 and 10 below. This GAS adhesin island 3 (“GAS AI-3”) comprises surface proteins, a SrtC2 sortase, and a Negative transcriptional regulator (Nra) divergently transcribed transcriptional regulator.

[0858] GAS AI-3 surface proteins within include a collagen binding protein, a fimbrial protein, a F2 like fibronectin-binding protein. GAS AI-3 surface proteins may also include a hypothetical surface protein. Preferably, each of these GAS AI-3 surface proteins include an LPXTG sortase substrate motif, such as LPXTG (SEQ ID NO:122), VPXTG (SEQ ID NO:137), QVXTG (SEQ ID NO:138) or LPXAG (SEQ ID NO:139).

[0859] GAS AI-3 includes a SrtC2 type sortase. GAS SrtC2 type sortases may preferably anchor surface proteins with a QVPTG (SEQ ID NO:140) motif, particularly when the motif is followed by a hydrophobic region and a charged C terminus tail. GAS SrtC2 may be differentially regulated by Nra.

[0860] GAS AI-3 may also include a LepA putative signal peptidase I protein. GAS AI-3 may also include a putative multiple sugar metabolism regulator.

TABLE 6
GAS AI-3 sequences from M3 isolate (MGAS315)

| | Sortase | |
|---|---|---|
| AI-3 | substrate | |
| sequence | sequence or | |
| identifier | sortase type | Functional description |
| SpyM3_0097 | | Negative transcriptional regulator (Nra) |
| SpyM3_0098 | VPXTG | putative collagen binding protein (Cpb) |
| SpyM3_0099 | | LepA putative signal peptidase I |
| SpyM3_0100 | QVXTG | conserved hypothetical protein |
| | | (fimbrial) |
| SpyM3_0101 | SrtC2 | sortase |
| SpyM3_0102 | LPXAG | hypothetical protein |
| SpyM3_0103 | | putative multiple sugar metabolism |
| | | regulator |
| SpyM3_0104 | LPXTG | protein F2 like fibronectin-binding |
| | | protein |

TABLE 7
GAS AI-3 sequence from M3 isolate (SSI-1)

| | Sortase | |
|---|---|---|
| AI-3 | Substrate | |
| sequence | seq. or | |
| identifier | sortase type | Functional description |
| SPs0099 | | Negative transcriptional regulator (Nra) |
| SPs0100 | VPXTG | putative collagen binding protein (Cpb) |
| SPs0101 | | LepA putative signal peptidase I |
| SPs0102 | QVXTG | conserved hypothetical protein |
| | | (fimbrial) |
| SPs0103 | SrtC2 | sortase |
| SPs0104 | LPXAG | hypothetical protein |
| SPs0105 | | putative multiple sugar metabolism |
| | | regulator |
| SPs0106 | LPXTG | protein F2 like fibronectin-binding |
| | | protein |

TABLE 10
GAS AI-3 sequences from M5 isolate (Manfredo)

| | Sortase | |
|---|---|---|
| AI-3 | substrate | |
| sequence | sequence or | |
| identifier | sortase type | Functional description |
| orf77 | | Negative transcriptional regulator (Nra) |
| orf78 | VPXTG | putative collagen binding protein (Cpb) |
| orf79 | | LepA putative signal peptidase I |
| orf80 | QVXTG | conserved hypothetical protein |
| | | (fimbrial) |
| orf81 | SrtC2 | sortase |
| orf82 | LPXAG | hypothetical protein |
| orf83 | | putative multiple sugar metabolism |
| | | regulator |
| orf84 | LPXTG | protein F2 like fibronectin-binding |
| | | protein |

TABLE 8
GAS AI-3 sequences from M18 isolate (MGAS8232)

| | Sortase | |
|---|---|---|
| AI-3 | substrate | |
| sequence | sequence or | |
| identifier | sortase type | Functional description |
| spyM18_0125 | | Negative transcriptional regulator (Nra) |
| | | (N-terminal fragment) |
| spyM18_0126 | VPXTG | putative collagen binding protein (Cpb) |
| spyM18_0127 | | LepA putative signal peptidase I |
| spyM18_0128 | QVXTG | conserved hypothetical protein |
| | | (fimbrial) |
| SpyM18_0129 | SrtC2 | sortase |
| spyM18_0130 | LPXAG | hypothetical protein |
| spyM18_0131 | | putative multiple sugar metabolism |
| | | regulator |
| spyM18_0132 | LPXTG | protein F2 like fibronectin-binding |
| | | protein |

TABLE 44
GAS AI-3 sequences from M49 isolate (591)

| | Sortase | |
|---|---|---|
| AI-3 | substrate | |
| sequence | sequence or | |
| identifier | sortase type | Functional description |
| SpyoM01000156 | | Negative transcriptional regulator (Nra) |
| SpyoM01000155 | VPXTG | collagen binding protein (Cpa) |
| SpyoM01000154 | | LepA putative signal peptidase I |
| SpyoM01000153 | QVXTG | conserved hypothetical protein |
| | | (fimbrial) |
| SpyoM01000152 | SrtC2 | sortase |
| SpyoM01000151 | LPXAG | hypothetical protein |
| SpyoM01000150 | | MsmRL |
| SpyoM01000149 | LPXTG | protein F2 like fibronectin-binding |
| | | protein |

[0861] A schematic of AI-3 serotypes M3, M5, M18, and M49 is shown in FIG. 51A. Each contains an open reading frame encoding a SrtC2-type sortase of nearly identical amino acid sequence. See FIG. 52B for an amino acid sequence alignment for each of the SrtC2 amino acid sequences.

[0862] The protein F2-like fibronectin-binding protein of each these type 3 adhesin islands contains a pilin motif and an E-box. FIG. 60 indicates the amino acid sequence of the pilin motif and E-box of each of GAS AI-3 serotype M3 MGAS315 (SpyM3_{—}0104/21909640), GAS AI-3 serotype M3 SSI (Sps0106/28895018), GAS AI-3 serotype M18 (SpyM18_{—}0132/19745307), and GASAI-3 serotype M5 (orf84).

[0863] FACS analysis has confirmed that the GAS AI-3 surface proteins SpyM3_{—}0098, SpyM3_{—}0100, SpyM3_{—}0102, and SpyM3_{—}0104 are expressed on the surface of GAS. FIG. 80 provides the results of FACS analysis for surface expression of SpyM3_{—}0098 on each of GAS serotypes M3 2721 and M3 3135. A shift in fluorescence is observed for each GAS serotype when anti-SpyM3_{—}0098 antiserum is present, demonstrating cell surface expression. Table 25, below, quantitatively summarizes the FACS fluorescence values obtained for each GAS serotype in the presence of pre-immune antiserum, anti-SpyM3_{—}0098 antiserum, and the difference in fluorescence value between the pre-immune and anti-SpyM3_{—}0098 antiserum.

TABLE 25
Summary of FACS values for surface expression of SpyM3_0098

| 2721 | | | 3135 | | |
|---|---|---|---|---|---|
| Pre- | Anti- | | Pre- | Anti- | |
| immune | spyM3_0098 | Change | immune | spyM3_0098 | Change |
| 117.85 | 249.51 | 132 | 99.17 | 277.21 | 178 |

[0864] FIG. 81 provides the results of FACS analysis for surface expression of SpyM3_{—}0100 on each of GAS serotypes M3 2721 and M3 3135. A shift in fluorescence is observed for each GAS serotype when anti-SpyM3_{—}0100 antiserum is present, demonstrating cell surface expression. Table 26, below, quantitatively summarizes the FACS fluorescence values obtained for each GAS serotype in the presence of pre-immune antiserum, anti-SpyM3_{—}0100 antiserum, and the difference in fluorescence value between the pre-immune and anti-SpyM3_{—}0100 antiserum.

TABLE 26
Summary of FACS values for surface expression of SpyM3_0100

| 2721 | | | 3135 | | |
|---|---|---|---|---|---|
| Pre- | Anti- | | Pre- | Anti- | |
| immune | spyM3_0100 | Change | immune | spyM3_0100 | Change |
| 110.31 | 181.91 | 72 | 97.87 | 250.01 | 152 |

[0865] FIG. 82 provides the results of FACS analysis for surface expression of SpyM3_{—}0102 on each of GAS serotypes M3 2721 and M3 3135. A shift in fluorescence is observed for each GAS serotype when anti-SpyM3_{—}0102 antiserum is present, demonstrating cell surface expression. Table 27, below, quantitatively summarizes the FACS fluorescence values obtained for each GAS serotype in the presence of pre-immune antiserum, anti-SpyM3_{—}0102 antiserum, and the difference in fluorescence value between the pre-immune and anti-SpyM3_{—}0102 antiserum.

TABLE 27
Summary of FACS values for surface expression of SpyM3_0102
in M3 serotypes

| 2721 | | | 3135 | | |
|---|---|---|---|---|---|
| Pre- | Anti- | | Pre- | Anti- | |
| immune | spyM3_0102 | Change | immune | spyM3_0102 | Change |
| 109.86 | 155.26 | 45 | 100.02 | 112.58 | 13 |

[0866] FIG. 82 also provides the results of FACS analysis for surface expression of a pilin antigen that has homology to SpyM3_{—}0102 identified in a different GAS serotype, M6. FACS analysis conducted with the SpyM3_{—}0102 antisera was able to detect surface expression of the homologous SpyM3_{—}0102 antigen on each of GAS serotypes M6 2724, M6 3650, and M6 2894. Table 28, below, quantitatively summarizes the FACS fluorescence values obtained for each GAS serotype in the presence of pre-immune antiserum, anti-SpyM3_{—}0102 antiserum, and the difference in fluorescence value between the pre-immune and anti-SpyM3_{—}0102 antiserum.

TABLE 28
Summary of FACS values for surface expression of SpyM3_0102 in M6 serotypes

| 2724 | | | 3650 | | | 2894 | | |
|---|---|---|---|---|---|---|---|---|
| Pre- | Anti- | | Pre- | Anti- | | Pre- | Anti- | |
| immune | spyM3_0102 | Change | immune | spyM3_0102 | Change | immune | spyM3_0102 | Change |
| 146.59 | 254.03 | 107 | 162.56 | 294.03 | 131 | 175.49 | 313.69 | 138 |

[0867] SpyM3_{—}0102 is also homologous to pilin antigen 19224139 of GAS serotype M12. Antisera raised against SpyM3_{—}0102 is able to detect high molecular weight structures in GAS serotype M12 strain 2728 protein fractions enriched for surface proteins, which would contain the 19224139 antigen. See FIG. 109 at the lane labelled M12 2728 surf prot.

[0868] FIG. 83 provides the results of FACS analysis for surface expression of SpyM3_{—}0104 on each of GAS serotypes M3 2721 and M3 3135. A shift in fluorescence is observed for each GAS serotype when anti-SpyM3_{—}0104 antiserum is present, demonstrating cell surface expression. Table 29, below, quantitatively summarizes the FACS fluorescence values obtained for each GAS serotype in the presence of pre-immune antiserum, anti-SpyM3_{—}0104 antiserum, and the difference in fluorescence value between the pre-immune and anti-SpyM3_{—}0104 antiserum.

TABLE 29
Summary of FACS values for surface expression of SpyM3_0104
in M3 serotypes

| 2721 | | | 3135 | | |
|---|---|---|---|---|---|
| Pre- | Anti- | | Pre- | Anti- | |
| immune | spyM3_0104 | Change | immune | spyM3_0104 | Change |
| 128.45 | 351.65 | 223 | 105.1 | 339.88 | 235 |

[0869] FIG. 83 also provides the results of FACS analysis for surface expression of a pilin antigen that has homology to SpyM3_{—}0104 identified in a different GAS serotype, M12. FACS analysis conducted with the SpyM3_{—}0104 antisera was able to detect surface expression of the homologous SpyM3_{—}0104 antigen on GAS serotype M12 2728. Table 30, below, quantitatively summarizes the FACS fluorescence values obtained for this GAS serotype in the presence of pre-immune antiserum, anti-SpyM3_{—}0104 antiserum, and the difference in fluorescence value between the pre-immune and anti-SpyM3_{—}0104 antiserum.

TABLE 30
Summary of FACS values for surface expression
of SpyM3_0104 in an M12 serotype
2728

| Pre-immune | Anti-spyM3_0104 | Change |
|---|---|---|
| 198.57 | 288.75 | 90 |

[0870] FIG. 84 provides the results of FACS analysis for surface expression of SPs_{—}0106 on each of GAS serotypes M3 2721 and M3 3135. A shift in fluorescence is observed for each GAS serotype when anti-SPs_{—}0106 antiserum is present, demonstrating cell surface expression. Table 31, below, quantitatively summarizes the FACS fluorescence values obtained for each GAS serotype in the presence of pre-immune antiserum, anti-SPs_{—}0106 antiserum, and the difference in fluorescence value between the pre-immune and anti-SPs_{—}0106 antiserum.

TABLE 31
Summary of FACS values for surface expression of
SPs_0106 in M3 serotypes

| 2721 | | | 3135 | | |
|---|---|---|---|---|---|
| | Anti- | | | Anti- | |
| Pre-immune | SPs_0106 | Change | Pre-immune | SPs_0106 | Change |
| 116 | 463.28 | 347 | 103.02 | 494.27 | 391 |

[0871] FIG. 84 also provides the results of FACS analysis for surface expression of a pilin antigen that has homology to SPs_{—}0106 identified in a different GAS serotype, M12. FACS analysis conducted with the SPs_{—}0106 antisera was able to detect surface expression of the homologous SPs_{—}0106 antigen on GAS serotype M12 2728. Table 32, below, quantitatively summarizes the FACS fluorescence values obtained for each GAS serotype in the presence of pre-immune antiserum, anti-SPs_{—}0106 antiserum, and the difference in fluorescence value between the pre-immune and anti-SPs_{—}0106 antiserum.

TABLE 32
Summary of FACS values for surface expression
of SPs_0106 in an M12 serotype
2728

| Pre-immune | Anti-SPs_0106 | Change |
|---|---|---|
| 304.01 | 254.64 | −49 |

[0872] (4) Adhesin Island Sequence Within M12: GAS Adhesin Island 4 (“GAS AI-4”)

[0873] GAS Adhesin Island sequences within M12 serotype are outlined in Table 11 below. This GAS adhesin island 4 (“GAS AI-4”) comprises surface proteins, a SrtC2 sortase, and a RofA regulatory protein.

[0874] GAS AI-4 surface proteins within may include a fimbrial protein, an F or F2 like fibronectin-binding protein, and a capsular polysaccharide adhesion protein (Cpa). GAS AI-4 surface proteins may also include a hypothetical surface protein in an open reading frame (orf). Preferably, each of these GAS AI-4 surface proteins include an LPXTG sortase substrate motif, such as LPXTG (SEQ ID NO:122), VPXTG (SEQ ID NO:137), QVXTG (SEQ ID NO:138) or LPXAG (SEQ ID NO:139). GAS AI-4 includes a SrtC2 type sortase. GAS SrtC2 type sortases may preferably anchor surface proteins with a QVPTG (SEQ ID NO:140) motif, particularly when the motif is followed by a hydrophobic region and a charged C terminus tail. GAS AI-4 may also include a LepA putative signal peptidase I protein and a MsmRL protein.

TABLE 11
GAS AI-4 sequences from M12 isolate (A735)

| | Sortase | |
|---|---|---|
| AI-4 | substrate | |
| sequence | sequence or | |
| identifier | sortase type | Functional description |
| 19224133 | | RofA regulatory protein |
| 19224134 | LPXTG | protein F |
| | SrtB | SrtB (stop codon*) |
| 19224135 | VPXTG | Cpa |
| 19224136 | | LepA |
| 19224137 | QVXTG | EftLSL.A (fimbrial) |
| 19224138 | SrtC2 | EftLSL.B |
| 19224139 | LPXAG | Orf2 |
| 19224140 | | MsmRL |
| 19224141 | LPXTG | protein F2 |

[0875] A schematic of AI-4 serotype M12 is shown in FIG. 51A.

[0876] One of the open reading frames encodes a SrtC2-type sortase having an amino acid sequence nearly identical to the amino acid sequence of the SrtC2-type sortase of the AI-3 serotypes described above. See FIG. 52B for an amino acid sequence alignment for each of the SrtC2 amino acid sequences.

[0877] Other proteins encoded by the open reading frames of the AI-4 serotype M12 are homologous to proteins encoded by other known adhesin islands in S. pyogenes, as well as the GAS AI-3 serotype M5 (Manfredo). FIG. 52 is an amino acid alignment of the capsular polysaccharide adhesion protein (cpa) of AI-4 serotype M12 (19224135), GAS AI-3 serotype M5 (ORF78), S. pyogenes strain MGAS315 serotype M3 (21909634), S. pyogenes SSI-1 serotype M3 (28810257), S. pyogenes MGAS8232 serotype M3 (19745301), and GAS AI-2 serotype M1 (GAS15). The amino acid sequence of the AI-4 serotype M12 cpa shares a high degree of homology with other cpa proteins.

[0878] FIG. 53 shows that the F-like fibronectin-binding protein encoded by the AI-4 serotype M12 open reading frame (19224134) shares homology with a F-like fibronectin-binding protein found in S. pyogenes strain MGAS10394 serotype M6 (50913503).

[0879] FIG. 54 is an amino acid sequence alignment that illustrates that the F2-like fibronectin-binding protein of AI-4 serotype M12 (19224141) shares homology with the F2-like fibronectin-binding protein of S. pyogenes strain MGAS8232 serotype M3 (19745307), GAS AI-3 serotype M5 (ORF84), S. pyogenes strain SSI serotype M3 (28810263), and S. pyogenes strain MGAS315 serotype M3 (21909640).

[0880] FIG. 55 is an amino acid sequence alignment that illustrates that the fimbrial protein of AI-4 serotype M12 (19224137) shares homology with the fimbrial protein of GAS AI-3 serotype M5 (ORF80), and the hypothetical protein of S. pyogenes strain MGAS315 serotype M3 (21909636), S. pyogenes strain SSI serotype M3 (28810259), S. pyogenes strain MGAS8732 serotype M3 (19745303), and S. pyogenes strain M1 GAS serotype M1 (13621428).

[0881] FIG. 56 is an amino acid sequence alignment that illustrates that the hypothetical protein of GAS AI-4 serotype M12 (19224139) shares homology with the hypothetical protein of S. pyogenes strain MGAS315 serotype M3 (21909638), S. pyogenes strain SSI-1 serotype M3 (28810261), GAS AI-3 serotype M5 (ORF82), and S. pyogenes strain MGAS8232 serotype M3 (19745305).

[0882] The protein F2-like fibronectin-binding protein of the type 4 adhesin island also contains a highly conserved pilin motif and an E-box. FIG. 60 indicates the amino acid sequence of the pilin motif and E-box in AI-4 serotype M12.

[0883] FACS analysis has confirmed that the GAS AI-4 surface proteins 19224134, 19224135, 19224137, and 19224141 are expressed on the surface of GAS. FIG. 85 provides the results of FACS analysis for surface expression of 19224134 on GAS serotype M12 2728. A shift in fluorescence is observed when anti-19224134 antiserum is present, demonstrating cell surface expression. Table 33, below, quantitatively summarizes the FACS fluorescence values obtained for GAS serotype M12 2728 in the presence of pre-immune antiserum, anti-19224134 antiserum, and the difference in fluorescence value between the pre-immune and anti-19224134 antiserum.

TABLE 33
Summary of FACS values for surface expression
of 19224134 in an M12 serotype
2728

| Pre-immune | Anti-19224134 | Change |
|---|---|---|
| 137.8 | 485.32 | 348 |

[0884] FIG. 85 also provides the results of FACS analysis for surface expression of a pilin antigen that has homology to 19224134 identified in a different GAS serotype, M6. FACS analysis conducted with the 19224134 antisera was able to detect surface expression of the homologous 19224134 antigen on each of GAS serotypes M6 2724, M6 3650, and M6 2894. Table 34, below, quantitatively summarizes the FACS fluorescence values obtained for each GAS serotype in the presence of pre-immune antiserum, anti-19224134 antiserum, and the difference in fluorescence value between the pre-immune and anti-19224134 antiserum.

TABLE 34
Summary of FACS values for surface expression of 19224134 in M6 serotypes

| 2724 | | | 3650 | | | 2894 | | |
|---|---|---|---|---|---|---|---|---|
| Pre- | Anti- | | Pre- | Anti- | | Pre- | Anti- | |
| immune | 19224134 | Change | immune | 19224134 | Change | immune | 19224134 | Change |
| 123.58 | 264.59 | 141 | 140.82 | 262.64 | 122 | 135.4 | 307.25 | 172 |

[0885] FIG. 86 provides the results of FACS analysis for surface expression of 19224135 on GAS serotype M12 2728. A shift in fluorescence is observed when anti-19224135 antiserum is present, demonstrating cell surface expression. Table 35, below, quantitatively summarizes the FACS fluorescence values obtained for GAS serotype M12 2728 in the presence of pre-immune antiserum, anti-19224135 antiserum, and the difference in fluorescence value between the pre-immune and anti-19224135 antiserum.

TABLE 35
Summary of FACS values for surface expression
of 19224135 in an M12 serotype
2728

| Pre-immune | Anti-19224135 | Change |
|---|---|---|
| 151.38 | 471.95 | 321 |

[0886] FIG. 87 provides the results of FACS analysis for surface expression of 19224137 on GAS serotype M12 2728. A shift in fluorescence is observed when anti-19224137 antiserum is present, demonstrating cell surface expression. Table 36, below, quantitatively summarizes the FACS fluorescence values obtained for GAS serotype M12 2728 in the presence of pre-immune antiserum, anti-19224137 antiserum, and the difference in fluorescence value between the pre-immune and anti-19224137 antiserum.

TABLE 36
Summary of FACS values for surface expression
of 19224137 in an M12 serotype
2728

| Pre-immune | Anti-19224137 | Change |
|---|---|---|
| 140.44 | 433.25 | 293 |

[0887] FIG. 88 provides the results of FACS analysis for surface expression of 19224141 on GAS serotype M12 2728. A shift in fluorescence is observed when anti-19224141 antiserum is present, demonstrating cell surface expression. Table 37, below, quantitatively summarizes the FACS fluorescence values obtained for GAS serotype M12 2728 in the presence of pre-immune antiserum, anti-19224141 antiserum, and the difference in fluorescence value between the pre-immune and anti-19224141 antiserum.

TABLE 37
Summary of FACS values for surface expression
of 19224141 in an M12 serotype
2728

| Pre-immune | Anti-19224141 | Change |
|---|---|---|
| 147.02 | 498 | 351 |

[0888] 19224139 (designated as orf2) may also be expressed on the surface of GAS serotype M12 bacteria. FIG. 175 shows the results of FACS analysis for surface expression of 19224139 on M12 strain 2728. A slight shift in fluorescence is observed, which demonstrates that some 19224139 may be expressed on the GAS cell surface.

[0889] Surface expression of 19224135 on M12 serotype GAS has also been confirmed by Western blot analysis. FIG. 99 shows that while pre-immune sera (P α-4135) does not detect GAS M12 expression of 19224135, anti-19224135 immune sera (I α-4135) is able to detect 19224135 protein in both total GAS M12 extracts (M12 tot) and GAS M12 fractions enriched for cell surface proteins (M12 surf prot). The 19224135 proteins detected in the total GAS M12 extracts or the GAS M12 extracts enriched for surface proteins are also present as high molecular weight structures, indicating that 19224135 may be in an oligomeric (pilus) form. See also FIG. 108, which provides a further Western blot showing that anti-19224135 antiserum (Anti-19224135) immunoreacts with high molecular weight structures in GAS M12 strain 2728 protein extracts enriched for surface proteins.

[0890] Surface expression of 19224137 on M12 serotype GAS has also been confirmed by Western blot analysis. FIG. 100 shows that while pre-immune sera (P α-4137) does not detect GAS M12 expression of 19224137, anti-19224137 immune sera (I α-4137) is able to detect 19224137 protein in both total GAS M12 extracts (M12 tot) and GAS M12 fractions enriched for cell surface proteins (M12 surf prot). The 19224137 proteins detected in the total GAS M12 extracts or the GAS M12 extracts enriched for surface proteins are also present as high molecular weight structures, indicating that 19224137 may be in an oligomeric (pilus) form. See also FIG. 108, which provides a further Western blot showing that anti-19224137 antiserum (Anti-19224137) immunoreacts with high molecular weight structures in GAS M12 strain 2728 protein extracts enriched for surface proteins.

Streptococcus pneumoniae

[0891] Adhesin island sequences can be identified in Streptococcus pneumoniae genomes. Several of these genomes include the publicly available Streptococcus pneumoniae TIGR4 genome or Streptococcus pneumoniae strain 670 genome. Examples of these S. pneumoniae AI sequence are discussed below.

[0892] S. pneumoniae Adhesin Islands generally include a series of open reading frames within a S. pneumoniae genome that encode for a collection of surface proteins and sortases. A S. pneumoniae Adhesin Island may encode for amino acid sequences comprising at least one surface protein. Alternatively, an S. pneumoniae Adhesin Island may encode for at least two surface proteins and at least one sortase. Preferably, a S. pneumoniae Adhesin Island encodes for at least three surface proteins and at least two sortases. One or more of the surface proteins may include an LPXTG motif (e.g., SEQ ID NO:122) or other sortase substrate motif. One or more S. pneumoniae AI surface proteins may participate in the formation of a pilus structure on the surface of the S. pneumoniae bacteria.

[0893] S. pneumoniae Adhesin Islands of the invention preferably include a divergently transcribed transcriptional regulator. The transcriptional regulator may regulate the expression of the S. pneumoniae AI operon.

[0894] The S. pneumoniae AI surface proteins may bind or otherwise adhere to fibrinogen, fibronectin, or collagen.

[0895] A schematic of the organization of a S. pneumoniae AI locus is provided in FIG. 137. The locus comprises open reading frames encoding a transcriptional regulator (r1rA), cell wall surface proteins (rrgA, rrgB, rrgC), and sortases (srtB, srtC, srtD). FIG. 137 also indicates the S. pneumoniae strain TIGR4 gene name corresponding to each of these open reading frames.

[0896] Tables 9 and 38 identify the genomic location of each of these open reading frames in S. pneumoniae strains TIGR4 and 670, respectively.

TABLE 9
S. pneumoniae AI sequences from TIGR4

| | | | | Synonym | |
|---|---|---|---|---|---|
| | | | | (AI Sequence | |
| Genomic Location | Strand | Length | PID | Identifier) | Functional description |
| 436302 . . . 437831 | − | 509 | 15900377 | SP0461 | transcriptional regulator |
| 438326 . . . 441007 | + | 893 | 15900378 | SP0462 | cell wall surface anchor family protein |
| 441231 . . . 443228 | + | 665 | 15900379 | SP0463 | cell wall surface anchor family protein |
| 443275 . . . 444456 | + | 393 | 15900380 | SP0464 | cell wall surface anchor family protein |
| 444675 . . . 444806 | − | 43 | 15900381 | SP0465 | hypothetical protein |
| 444857 . . . 445696 | + | 279 | 15900382 | SP0466 | sortase |
| 445791 . . . 446576 | + | 261 | 15900383 | SP0467 | sortase |
| 446563 . . . 447414 | + | 283 | 15900384 | SP0468 | sortase |

TABLE 38
S. pneumoniae strain 670 AI sequences

| Genomic | | AI Sequence | |
|---|---|---|---|
| Location | Strand | Identifier\ | Functional description |
| 4383-5645 | − | Orf1_670 | IS1167, transposase |
| 5910-7439 | − | Orf2_670 | transcriptional regulator, putative |
| 7934-10606 | + | Orf3_670 | cell wall surface anchor family |
| | | | protein |
| 10839-12773 | + | Orf4_670 | cell wall surface anchor family |
| | | | protein |
| 12796-14001 | + | Orf5_670 | cell wall surface anchor family |
| | | | protein |
| 14327-15241 | + | Orf6_670 | sortase, putative |
| 15336-16121 | + | Orf7_670 | sortase, putative |
| 16108-16959 | + | Orf8_670 | sortase, putative |

[0897] The full-length nucleotide sequence of the S. pneumoniae strain 670 AI is also shown in FIG. 101, as is its translated amino acid sequence.

[0898] At least eight other S. pneumoniae strains contain an adhesin island locus described by the locus depicted in FIG. 137. These strains were identified by an amplification analysis. The genomes of different S. pneumoniae strains were amplified with eleven separate sets of primers. The sequence of each of these primers is provided below in Table 41.

TABLE 41
Sequences of primers used to amplify AT locus

| Primer | Forward Primer | Reverse Primer |
|---|---|---|
| Pair | Sequence | Sequence |
| 1 | ACTTTCTAATGAGTTGTTTAG | AGCGACAAGCCACTGTATCAT |
| | GCG | ATT |
| | (SEQ ID NO: 274) | (SEQ ID NO: 285) |
| 2 | CTGGTCGATAACTCCTTCAAT | GTACGACAAAAGTGTGGCTTG |
| | CTT | TT |
| | (SEQ ID NO: 275) | (SEQ ID NO: 286) |
| 3 | GAATGCGATATTCAGGACCAA | ATCTCACTGAGTTAATCCGTT |
| | CTA | CAC |
| | (SEQ ID NO: 276) | (SEQ ID NO: 287) |
| 4 | TGTATACAAGTGTGTCATTGC | CATCTTCACCTGTTCTCACAT |
| | CAG | TTT |
| | (SEQ ID NO: 277) | (SEQ ID NO: 288) |
| 5 | GCGGTCTTTAGTCTTCAAAAA | CAAGAGAAAAACACAGAGCCA |
| | CA | TAA |
| | (SEQ ID NO: 278) | (SEQ ID NO: 289) |
| 6 | TTGCTTAAGTAAGAGAGAAAG | CAGGAGTATAGTGTCCGCTTT |
| | GAGC | CTT |
| | (SEQ ID NO: 279) | (SEQ ID NO: 290) |
| 7 | GGCAATGTTGACTTTATGAAG | TATCAGCATCCCTTTATCTTC |
| | GTG | AAAC |
| | (SEQ ID NO: 280) | (SEQ ID NO: 291) |
| 8 | TGAGATTTTCTCGTTTCTCTT | AATAGACGATGGGTATTGATC |
| | AGC | ATGT |
| | (SEQ ID NO: 281) | (SEQ ID NO: 292) |
| 9 | CCGACGAACTTTGATGATTTA | ACCAACAGACGATGACTGTTA |
| | TTG | ATC |
| | (SEQ ID NO: 282) | (SEQ ID NO: 293) |
| 10 | AATGACTTTGAGCCTGTCTTG | TTCTACAATTTCCTGGCCATT |
| | AT | ATC |
| | (SEQ ID NO: 283) | (SEQ ID NO: 294) |
| 11 | GCCATTTGGATCAGCTAAAAG | TTTTTCAACCCACTACAGTTG |
| | TT | ACA |
| | (SEQ ID NO: 284) | (SEQ ID NO: 295) |

These primers hybridized along the entire length of the AI locus to generate amplification products representative of sequences throughout the locus. See FIG. 138, which is a schematic of the location where each of these primers hybridizes to the S. pneumoniae AI locus. FIG. 139A provides the set of amplicons obtained from amplification of the AI locus in S. pneumoniae strain TIGR4. FIG. 139B provides the length, in base pairs, of each amplicon in S. pneumoniae strain TIGR4. Amplification of the genome of S. pneumoniae strains 19A Hungary 6, 6B Finland 12, 6B Spain 2, 9V Spain 3, 14 CSR 10, 19F Taiwan 14, 23F Taiwan 15, and 23F Poland 16 produced a set of eleven amplicons for the eleven primer pairs, indicating that each of these strains also contained the S. pneumoniae AI locus.

[0899] The S. pneumoniae strains were also identified as containing the AI locus by comparative genome hybridization (CGH) analysis. The genomes of sixteen S. pneumoniae strains were interrogated for the presence of the AI locus by comparison to unique open reading frames of strain TIGR4. The AI locus was detected by this method in strains 19A Hungary 6 (19AHUN), 6B Finland 12 (6BFIN12), 6B Spain 2 (6BSP2), 14CSR10 (14 CSR10), 9V Spain 3 (9VSP3), 19F Taiwan 14 (19FTW14), 23F Taiwan 15 (19FTW15), and 23F Poland 16 (23FP16). See FIG. 140.

[0900] The AI locus has been sequenced for each of these strains and the nucleotide and encoded amino acid sequence for each orf has been determined An alignment of the complete nucleotide sequence of the adhesin island present in each of the ten strains is provided in FIG. 196. Aligning the amino acid sequences encoded by the orfs reveals conservation of many of the AI polypeptide amino acid sequences. For example, Table 39 provides a comparison of the percent identities of the polypeptides encoded within the S. pneumoniae strain 670 and TIGR4 adhesin islands.

TABLE 39
Percent identity comparison of
S. pneumoniae strains AI sequences

| S. pneumoniae strain | S. pneumoniae from | Shared identity |
|---|---|---|
| 670 polypeptide | TIGR4 polypeptide | of polypeptides |
| Orf1_670 | SP0460 | 99.3% identity in |
| | | 422 aa overlap |
| Orf2_670 | SP0461 | 100.0% identity in |
| | | 509 aa overlap |
| Orf3_670 | SP0462 | 83.2% identity in |
| | | 895 aa overlap |
| Orf4_670 | SP0463 | 47.9% identity in |
| | | 678 aa overlap |
| Orf5_670 | SP0464 | 99.7% identity in |
| | | 393 aa overlap |
| Orf6_670 | SP0466 | 100.0% identity in |
| | | 279 aa overlap |
| Orf7_670 | SP0467 | 94.2% identity in |
| | | 260 aa overlap |
| Orf8_670 | SP0468 | 91.5% identity in |
| | | 283 aa overlap |

FIGS. 141-147 each provide a multiple sequence alignment for the polypeptides encoded by one of the open reading frames in all ten AI-positive S. pneumoniae strains. In each of the sequence alignments, light shading indicates an LPXTG motif and dark shading indicates the presence of an E-box motif with the conserved glutamic acid residue of the E-box motif in bold.

[0901] The sequence alignments also revealed that the polypeptides encoded by most of the open reading frames may be divided into two groups of homology, S. pneumoniae AI-a and AI-b. S. pneumoniae strains that comprise AI-a include 14 CSR 10, 19A Hungary 6, 23F Poland 15, 670, 6B Finland 12, and 6B Spain 2. S. pneumoniae strains that comprise AI-b include 19F Taiwan 14, 9V Spain 3, 23F Taiwan 15, and TIGR4. An immunogenic composition of the invention may comprise one or more polypeptides from within each of S. pneumoniae AI-a and AI-b. For example, polypeptide RrgB, encoded by open reading frame 4, may be divided within two such groups of homology. One group contains the RrgB sequences of six S. pneumoniae strains and a second group contains the RrgB sequences of four S. pneumoniae strains. While the amino acid sequence of the strains within each individual group is 99-100 percent identical, the amino acid sequence identity of the strains in the first relative to the second group is only 48%. Table 41 provides the identity comparisons of the amino acid sequences encoded by each open reading frame for the ten S. pneumoniae strains.

TABLE 42
Conservation of amino acid sequences encoded
by the S. pneumoniae AI locus

| | | | | % Identity |
|---|---|---|---|---|
| Putative Role | Encoded | Groups of | % Identity | Between |
| of Polypeptide | by Orf | Homology | in Group | Groups |
| RlrA, transcrip- | 2 | 1 group (10 | 100 | — |
| tional regulator | | strains) | | |
| RrgA, cell wall | 3 | 2 groups (6 + 4) | 98-100 | 83 |
| surface protein | | | | |
| RrgB, cell wall | 4 | 2 groups (6 + 4) | 99-100 | 48 |
| surface protein | | | | |
| RrgC, cell wall | 5 | 2 groups (6 + 4) | 99-100 | 97 |
| surface protein | | | | |
| SrtB, putative | 6 | 2 groups (7 + 3) | 99-100 | 97 |
| sortase | | | | |
| SrtC, putative | 7 | 2 groups (6 + 4) | 95-100 | 93 |
| sortase | | | | |
| SrtD, putative | 8 | 2 groups (6 + 4) | 99-100 | 92 |
| sortase | | | | |

[0902] The division of homology between the RrgB polypeptide in the S. pneumoniae strains is due a lack of amino acid sequence identity in the central amino acid residues. Amino acid residues 1-30 and 617-665 are identical for each of the ten S. pneumoniae strains. However, amino acid residues 31-616 share between 42 and 100 percent identity between strains. See FIG. 149. The shared N- and C-terminal regions of identity in the RrgB polypeptides may be preferred portions of the RrgB polypeptide for use in an immunogenic composition. Similarly, shared regions of identity in any of the polypeptides encoded by the S. pneumoniae AI locus may be preferable for use in immunogenic compositions. One of skill in the art, using the amino acid alignments provided in FIGS. 141-147, would readily be able to determine these regions of identity.

[0903] The S. pneumoniae comprising these AI loci do, in fact, express high molecular weight polymers on their surface, indicating the presence of pili. See FIG. 182, which shows detection of high molecular weight structures expressed by S. pneumoniae strains that comprise the adhesin island locus depicted in FIG. 137, these strains are indicated as rlrA+. Confirming these findings, electron microscopy and negative staining detects the presence of pili extending from the surface of S. pneumoniae. See FIG. 185. To demonstrate that the adhesin island locus was responsible for the pili, the rrgA-srtD region of TIGR 4 were deleted. Deletion of this region of the adhesin island resulted in a loss of pili expression. See FIG. 186. See also FIG. 235, which provides an electron micrograph of S. pneumoniae lacking the rrgA-srtD region immunogold stained using anti-RrgB and anti-RrgC antibodies. No pili can be seen. Similarly to that described above, a S. pneumoniae bacteria that lacks a transcriptional repressor, mgrA, of genes in the adhesin island expresses pili. See FIG. 187. However, and as expected, a S. pneumoniae bacteria that lacks both the mgrA and adhesin island genes in the rrgA-srtD region does not express pili. See FIG. 188.

[0904] These high molecular weight pili structures appear to play a role in adherence of S. pneumoniae to cells. S. pneumoniae TIGR4 that lack the pilus operon have significantly diminished ability to adhere to A549 alveolar cells in vitro. See FIG. 184.

[0905] The Sp0463 (S. pneumoniae TIGR4 rrgB) adhesion island polypeptide is expressed in oligomeric form. Whole cell extracts were analyzed by Western blot using a Sp0463 antiserum. The antiserum cross-hybridized with high molecular weight Sp0463 polymers. See FIG. 156. The antiserum did not cross-hybridize with polypeptides from D39 or R6 strains of S. pneumoniae, which do not contain the AI locus depicted in FIG. 137. Immunogold labelling of S. pneumoniae TIGR 4 using RrgB antiserum confirms the presence of RrgB in pili. FIG. 189 shows double-labeling of S. pneumoniae TIGR 4 bacteria with immunolabeling for RrgB (5 nm gold particles) and RrgC (10 nm gold particles) protein. The RrgB protein is detected as present at intervals along the pilus structure. The RrgC protein is detected at the tips of the pili. See FIG. 234 at arrows; FIG. 234 is a close up of a pilus in FIG. 189 at the location indicated by *.

[0906] The RrgA protein appears to be present in and necessary for formation of high molecular weight structures on the surface of S. pneumoniae TIGR4. See FIG. 181 which provides the results of Western blot analysis of TIGR4 S. pneumoniae lacking the gene encoding RrgA. No high molecular weight structures are detected in S. pneumoniae that do not express RrgA using antiserum raised against RrgB. See also FIG. 183.

[0907] A detailed diagram of the amino acid sequence comparisons of the RrgA protein in the ten S. pneumoniae strains is shown in FIG. 148. The diagram reveals the division of the individual S. pneumoniae strains into the two different homology groups.

[0908] The cell surface polypeptides encoded by the S. pneumoniae TIGR4 AI, Sp0462 (rrgA), Sp0463 (rrgB), and Sp0464 (rrgC), have been cloned and expressed. See examples 15-17. A polyacrylamide gel showing successful recombinant expression of RrgA is provided in FIG. 190A. Detection of the RrgA protein, which is expressed in pET21b with a histidine tag, is also shown by Western blot analysis in FIG. 190B, using an anti-histidine tag antibody.

[0909] Antibodies that detect RrgB and RrgC antibodies have been produced in mice. See FIGS. 191 and 192, which show detection of RrgB and RrgC, respectively, using the raised antibodies.

[0910] In addition to the identification of these S. pneumoniae adhesion islands, coding sequences for SrtB type sortases have been identified in several S. pneumoniae clinical isolates, demonstrating conservation of a SrtB type sortase across these isolates.

### Recombinantly Produced AI Polypeptides

[0911] It is also an aspect of the invention to alter a non-AI polypeptide to be expressed as an AI polypeptide. The non-AI polypeptide may be genetically manipulated to additionally contain AI polypeptide sequences, e.g., a sortase substrate, pilin, or E-box motif, which may cause expression of the non-AI polypeptide as an AI polypeptide. Alternatively the non-AI polypeptide may be genetically manipulated to replace an amino acid sequence within the non-AI polypeptide for AI polypeptide sequences, e.g., a sortase substrate, pilin, or E-box motif, which may cause expression of the non-AI polypeptide as an AI polypeptide. Any number of amino acid residues may be added to the non-AI polypeptide or may be replaced within the non-AI polypeptide to cause its expression as an AI polypeptide. At least 5, 6, 7, 8, 9, 10, 15, 20, 25, 30, 35, 50, 75, 100, 150, 200, or 250 amino acid residues may be replaced or added to the non-AI polypeptide amino acid sequence. GBS 322 may be one such non-AI polypeptide that may be expressed as an AI polypeptide.

### GBS Adhesin Island Sequences

[0912] The GBS AI polypeptides of the invention can, of course, be prepared by various means (e.g. recombinant expression, purification from GBS, chemical synthesis etc.) and in various forms (e.g. native, fusions, glycosylated, non-glycosylated etc.). They are preferably prepared in substantially pure form (i.e. substantially free from other streptococcal or host cell proteins) or substantially isolated form.

[0913] The GBS AI proteins of the invention may include polypeptide sequences having sequence identity to the identified GBS proteins. The degree of sequence identity may vary depending on the amino acid sequence (a) in question, but is preferably greater than 50% (e.g. 60%, 65%, 70%, 75%, 80%, 85%, 90%, 91%, 92%, 93%, 94%, 95%, 96%, 97%, 98%, 99%, 99.5% or more). Polypeptides having sequence identity include homologs, orthologs, allelic variants and functional mutants of the identified GBS proteins. Typically, 50% identity or more between two proteins is considered to be an indication of functional equivalence. Identity between proteins is preferably determined by the Smith-Waterman homology search algorithm as implemented in the MPSRCH program (Oxford Molecular), using an affinity gap search with parameters gap open penalty=12 and gap extension penalty=1.

[0914] The GBS adhesin island polynucleotide sequences may include polynucleotide sequences having sequence identity to the identified GBS adhesin island polynucleotide sequences. The degree of sequence identity may vary depending on the polynucleotide sequence in question, but is preferably greater than 50% (e.g. 60%, 65%, 70%, 75%, 80%, 85%, 90%, 91%, 92%, 93%, 94%, 95%, 96%, 97%, 98%, 99%, 99.5% or more).

[0915] The GBS adhesin island polynucleotide sequences of the invention may include polynucleotide fragments of the identified adhesin island sequences. The length of the fragment may vary depending on the polynucleotide sequence of the specific adhesin island sequence, but the fragment is preferably at least 10 consecutive polynucleotides, (e.g. at least 10, 12, 14, 16, 18, 20, 25, 30, 35, 40, 50, 60, 70, 80, 90, 100, 150, 200 or more).

[0916] The GBS adhesin island amino acid sequences of the invention may include polypeptide fragments of the identified GBS proteins. The length of the fragment may vary depending on the amino acid sequence of the specific GBS antigen, but the fragment is preferably at least 7 consecutive amino acids, (e.g. 8, 10, 12, 14, 16, 18, 20, 25, 30, 35, 40, 50, 60, 70, 80, 90, 100, 150, 200 or more). Preferably the fragment comprises one or more epitopes from the sequence. Other preferred fragments include (1) the N-terminal signal peptides of each identified GBS protein, (2) the identified GBS protein without their N-terminal signal peptides, and (3) each identified GBS protein wherein up to 10 amino acid residues (e.g. 1, 2, 3, 4, 5, 6, 7, 8, 9, 10, 15, 20, 25 or more) are deleted from the N-terminus and/or the C-terminus e.g. the N-terminal amino acid residue may be deleted. Other fragments omit one or more domains of the protein (e.g. omission of a signal peptide, of a cytoplasmic domain, of a transmembrane domain, or of an extracellular domain).

### GBS 80

[0917] Examples of preferred GBS 80 fragments are discussed below. Polynucleotide and polypeptide sequences of GBS 80 from a variety of GBS serotypes and strain isolates are set forth in FIGS. 18 and 22. The polynucleotide and polypeptide sequences for GBS 80 from GBS serotype V, strain isolate 2603 are also included below as SEQ ID NOS 1 and 2:

SEQ ID NO. 1

ATGAAATTATCGAAGAAGTTATTGTTTTCGGCTGCTGTTTTAACAATGGT
GGCGGGGTCAACTGTTGAACCAGTAGCTCAGTTTGCGACTGGAATGAGTA
TTGTAAGAGCTGCAGAAGTGTCACAAGAACGCCCAGCGAAAACAACAGTA
AATATCTATAAATTACAAGCTGATAGTTATAAATCGGAAATTACTTCTAA
TGGTGGTATCGAGAATAAAGACGGCGAAGTAATATCTAACTATGCTAAAC
TTGGTGACAATGTAAAAGGTTTGCAAGGTGTACAGTTTAAACGTTATAAA
GTCAAGACGGATATTTCTGTTGATGAATTGAAAAAATTGACAACAGTTGA
AGCAGCAGATGCAAAAGTTGGAACGATTCTTGAAGAAGGTGTCAGTCTAC
CTCAAAAAACTAATGCTCAAGGTTTGGTCGTCGATGCTCTGGATTCAAAA
AGTAATGTGAGATACTTGTATGTAGAAGATTTAAAGAATTCACCTTCAAA
CATTACCAAAGCTTATGCTGTACCGTTTGTGTTGGAATTACCAGTTGCTA
ACTCTACAGGTACAGGTTTCCTTTCTGAAATTAATATTTACCCTAAAAAC
GTTGTAACTGATGAACCAAAAACAGATAAAGATGTTAAAAAATTAGGTCA
GGACGATGCAGGTTATACGATTGGTGAAGAATTCAAATGGTTCTTGAAAT
CTACAATCCCTGCCAATTTAGGTGACTATGAAAAATTTGAAATTACTGAT
AAATTTGCAGATGGCTTGACTTATAAATCTGTTGGAAAAATCAAGATTGG
TTCGAAAACACTGAATAGAGATGAGCACTACACTATTGATGAACCAACAG
TTGATAACCAAAATACATTAAAAATTACGTTTAAACCAGAGAAATTTAAA
GAAATTGCTGAGCTACTTAAAGGAATGACCCTTGTTAAAAATCAAGATGC
TCTTGATAAAGCTACTGCAAATACAGATGATGCGGCATTTTTGGAAATTC
CAGTTGCATCAACTATTAATGAAAAAGCAGTTTTAGGAAAAGCAATTGAA
AATACTTTTGAACTTCAATATGACCATACTCCTGATAAAGCTGACAATCC
AAAACCATCTAATCCTCCAAGAAAACCAGAAGTTCATACTGGTGGGAAAC
GATTTGTAAAGAAAGACTCAACAGAAACACAAACACTAGGTGGTGCTGAG
TTTGATTTGTTGGCTTCTGATGGGACAGCAGTAAAATGGACAGATGCTCT
TATTAAAGCGAATACTAATAAAAACTATATTGCTGGAGAAGCTGTTACTG
GGCAACCAATCAAATTGAAATCACATACAGACGGTACGTTTGAGATTAAA
GGTTTGGCTTATGCAGTTGATGCGAATGCAGAGGGTACAGCAGTAACTTA
CAAATTAAAAGAAACAAAAGCACCAGAAGGTTATGTAATCCCTGATAAAG
AAATCGAGTTTACAGTATCACAAACATCTTATAATACAAAACCAACTGAC
ATCACGGTTGATAGTGCTGATGCAACACCTGATACAATTAAAAACAACAA
ACGTCCTTCAATCCCTAATACTGGTGGTATTGGTACGGCTATCTTTGTCG
CTATCGGTGCTGCGGTGATGGCTTTTGCTGTTAAGGGGATGAAGCGTCGT
ACAAAAGATAAC

SEQ ID NO: 2

MKLSKKLLFSAAVLTMVAGSTVEPVAQFATGMSIVRAAEVSQERPAKTTV
NIYKLQADSYKSEITSNGGIENKDGEVISNYAKLGDNVKGLQGVQFKRYK
VKTDISVDELKKLTTVEAADAKVGTILEEGVSLPQKTNAQGLVVDALDSK
SNVRYLYVEDLKNSPSNITKAYAVPFVLELPVANSTGTGFLSEINIYPKN
VVTDEPKTDKDVKKLGQDDAGYTIGEEFKWFLKSTIPANLGDYEKFEITD
KFADGLTYKSVGKIKIGSKTLNRDEHYTIDEPTVDNQNTLKITFKPEKFK
EIAELLKGMTLVKNQDALDKATANTDDAAFLEIPVASTINEKAVLGKAIE
NTFELQYDHTPDKADNPKPSNPPRKPEVHTGGKRFVKKDSTETQTLGGAE
FDLLASDGTAVKWTDALIKANTNKNYIAGEAVTGQPIKLKSHTDGTFEIK
GLAYAVDANAEGTAVTYKLKETKAPEGYVIPDKEIEFTVSQTSYNTKPTD
ITVDSADATPDTIKNNKRPSIPNTGGIGTAIFVAIGAAVMAFAVKGMKRR
TKDN

[0918] As described above, the compositions of the invention may include fragments of AI proteins. In some instances, removal of one or more domains, such as a leader or signal sequence region, a transmembrane region, a cytoplasmic region or a cell wall anchoring motif, may facilitate cloning of the gene encoding the protein and/or recombinant expression of the GBS AI protein. In addition, fragments comprising immunogenic epitopes of the cited GBS AI proteins may be used in the compositions of the invention.

[0919] For example, GBS 80 contains an N-terminal leader or signal sequence region which is indicated by the underlined sequence at the beginning of SEQ ID NO:2 above. In one embodiment, one or more amino acids from the leader or signal sequence region of GBS 80 are removed. An example of such a GBS 80 fragment is set forth below as SEQ ID NO:3:

SEQ ID NO: 3

AEVSQERPAKTTVNIYKLQADSYKSEITSNGGIENKDGEVISNYAKLGDN
VKGLQGVQFKRYKVKTDISVDELKKLTTVEAADAKVGTILEEGVSLPQKT
NAQGLVVDALDSKSNVRYLYVEDLKNSPSNITKAYAVPFVLELPVANSTG
TGFLSEINIYPKNVVTDEPKTDKDVKKLGQDDAGYTIGEEFKWFLKSTIP
ANLGDYEKFEITDKFADGLTYKSVGKIKIGSKTLNRDEHYTIDEPTVDNQ
NTLKITFKPEKFKEIAELLKGMTLVKNQDALDKATANTDDAAFLEIPVAS
TINEKAVLGKAIENTFELQYDHTPDKADNPKPSNPPRKPEVHTGGKRFVK
KDSTETQTLGGAEFDLLASDGTAVKWTDALIKANTNKNYIAGEAVTGQPI
KLKSHTDGTFEIKGLAYAVDANAEGTAVTYKLKETKAPEGYVIPDKEIEF
TVSQTSYNTKPTDITVDSADATPDTIKNKKRPSIPNTGGIGTAIFVAIGA
AVMAFAVKGMKRRTKDN

[0920] GBS 80 contains a C-terminal transmembrane region which is indicated by the underlined sequence near the end of SEQ ID NO:2 above. In one embodiment, one or more amino acids from the transmembrane region and/or a cytoplasmic region are removed. An example of such a GBS 80 fragment is set forth below as SEQ ID NO:4:

SEQ ID NO: 4

MKLSKKLLFSAAVLTMVAGSTVEPVAQFATGMSIVRAAEVSQERPAKTTV
NIYKLQADSYKSEITSNGGIENKDGEVISNYAKLGDNVKGLQGVQFKRYK
VKTDISVDELKKLTTVEAADAKVGTILEEGVSLPQKTNAQGLVVDALDSK
SNVRYLYVEDLKNSPSNITKAYAVPFVLELPVANSTGTGFLSEINIYPKN
VVTDEPKTDKDVKKLGQDDAGYTIGEEFKWFLKSTIPANLGDYEKFEITD
KFADGLTYKSVGKIKIGSKTLNRDEHYTIDEPTVDNQNTLKITFKPEKFK
EIAELLKGMTLVKNQDALDKATANTDDAAFLEIPVASTINEKAVLGKAIE
NTFELQYDHTPDKADNPKPSNPPRKPEVHTGGKRFVKKDSTETQTLGGAE
FDLLASDGTAVKWTDALIKANTNKNYIAGEAVTGQPIKLKSHTDGTFEIK
GLAYAVDANAEGTAVTYKLKETKAPEGYVIPDKEIEFTVSQTSYNTKPTD
ITVDSADATPDTIKNKKRPSIPNTG

[0921] GBS 80 contains an amino acid motif indicative of a cell wall anchor: SEQ ID NO:5 IPNTG (shown in italics in SEQ ID NO:2 above). In some recombinant host cell systems, it may be preferable to remove this motif to facilitate secretion of a recombinant GBS 80 protein from the host cell. Accordingly, in one preferred fragment of GBS 80 for use in the invention, the transmembrane and/or cytoplasmic regions and the cell wall anchor motif are removed from GBS 80. An example of such a GBS 80 fragment is set forth below as SEQ ID NO:6.

SEQ ID NO: 6

MKLSKKLLFSAAVLTMVAGSTVEPVAQFATGMSIVPAAEVSQERPAKTTV
NIYKLQADSYKSEITSNGGIENKDGEVISNYAKLGDNVKGLQGVQFKRYK
VKTDISVDELKKLTTVEAADAKVGTILEEGVSLPQKTNAQGLVVDALDSK
SNVRYLYVEDLKNSPSNITKAYAVPFVLELPVANSTGTGFLSEINIYPKN
VVTDEPKTDKDVKKLGQDDAGYTIGEEFKWFLKSTIPANLGDYEKFEITD
KFADGLTYKSVGKIKIGSKTLNRDEHYTIDEPTVDNQNTLKITFKPEKFK
EIAELLKGMTLVKNQDALDKATANTDDAAFLEIPVASTINEKAVLGKAIE
NTFELQYDHTPDKADNPKPSNPPRKPEVHTGGKRFVKKDSTETQTLGGAE
FDLLASDGTAVKWTDALIKANTNKNYIAGEAVTGQPIKLKSHTDGTFEIK
GLAYAVDANAEGTAVTYKLKETKAPEGYVIPDKEIEFTVSQTSYNTKPTD
ITVDSADATPDITKNKKRPS

[0922] Alternatively, in some recombinant host cell systems, it may be preferable to use the cell wall anchor motif to anchor the recombinantly expressed protein to the cell wall. The extracellular domain of the expressed protein may be cleaved during purification or the recombinant protein may be left attached to either inactivated host cells or cell membranes in the final composition.

[0923] In one embodiment, the leader or signal sequence region, the transmembrane and cytoplasmic regions and the cell wall anchor motif are removed from the GBS 80 sequence. An example of such a GBS 80 fragment is set forth below as SEQ ID NO:7.

SEQ ID NO: 7

AEVSQERPAKTTVNIYKLQADSYKSEITSNGGIENKDGEVISNYAKLGDN
VKGLQGVQFKRYKVKTDISVDELKKLTTVEAADAKVGTILEEGVSLPQKT
NAQGLVVDALDSKSNVRYLYVEDLKNSPSNITKAYAVPFVLELPVANSTG
TGFLSEINIYPKNVVTDEPKTDKDVKKLGQDDAGYTIGEEFKWFLKSTIP
ANLGDYEKFEITDKFADGLTYKSVGKIKIGSKTLNRDEHYTIDEPTVDNQ
NTLKITFKPEKFKEIAELLKGMTLVKNQDALDKATANTDDAAFLEIPVAS
TINEKAVLGKATENTFELQYDHTPDKADNPKPSNPPRKPEVHTGGKRFVK
KDSTETQTLGGAEFDLLASDGTAVKWTDALIKANTNKNYIAGEAVTGQPI
KLKSHTDGTFEIKGLAYAVDANAEGTAVTYKLKETKAPEGYVIPDKEIEF
TVSQTSYNTKPTDITVDSADATPDTIKNKKRPS

[0924] Applicants have identified a particularly immunogenic fragment of the GBS 80 protein. This immunogenic fragment is located towards the N-terminus of the protein and is underlined in the GBS 80 SEQ ID NO:2 sequence below. The underlined fragment is set forth below as SEQ ID NO:8.

SEQ ID NO: 2

MKLSKKLLFSAAVLTMVAGSTVEPVAQFATGMSIVPAAEVSQERPAKTTV
NIYKLQADSYKSEITSNGGIENKDGEVISNYAKLGDNVKGLQGVQFKRYK
VKTDISVDELKKLTTVEAADAKVGTILEEGVSLPQKTNAQGLVVDALDSK
SNVRYLYVEDLKNSPSNITKAYAVPFVLELPVANSTGTGFLSEINIYPKN
VVTDEPKTDKDVKKLGQDDAGYTIGEEFKWFLKSTIPANLGDYEKFEITD
KFADGLTYKSVGKIKIGSKTLNRDEHYTIDEPTVDNQNTLKITFKPEKFK
EIAELLKGMTLVKNQDALDKATANTDDAAFLEIPVASTINEKAVLGKAIE
NTFELQYDHTPDKADNPKPSNPPRKPEVHTGGKRFVKKDSTETQTLGGAE
FDLLASDGTAVKWTDALIKANTNKNYIAGEAVTGQPOKLKSHTDGTFEIK
GLAYAVDANAEGTAVTYKLKETKAPEGYVIPDKEIEFTVSQTSYNTKPTD
ITVDSADATPDTIKNNKRPSIPNTGGIGTAIFVAIGAAVMAFAVKGMKRR
TKDN

SEQ ID NO: 8

AEVSQERPAKTTVNIYKLQADSYKSEITSNGGIENKDGEVISNYAKLGDN
VKGLQGVQFKRYKVKTDISVDELKKLTTVEAADAKVGTILEEGVSLPQKT
NAQGLVVDALDSKSNVRYLYVEDLKNSPSNITKAYAVPFVLELPVANSTG
TGFLSEINIYPKNVVTDEPKTDKDVKKLGQDDAGYTIGEEFKWFLKSTIP
ANLGDYEKFEITDKFADGLTYKSVGKIKIGSKTLNRDEHYTIDEPTVDNQ
NTLKITFKPEKFKEIAELLKG

[0925] The immunogenicity of the protein encoded by SEQ ID NO:7 was compared against PBS, GBS whole cell, GBS 80 (full length) and another fragment of GBS 80, located closer to the C-terminus of the peptide (SEQ ID NO:9, below).

SEQ ID NO: 9

MTLVKNQDALDKATANTDDAAFLEIPVASTINEKAVLGKAIENTFELQYD
HTPDKADNPKPSNPPRKPEVHTGGKRFVKKDSTETQTLGGAEFDLLASDG
TAVKWTDALIKANTNKNYIAGEAVTGQPIKLKSHTDGTFEIKGLAYAVDA
NAEGTAVTYKLKETKAPEGYVIPDKEIEFTVSQTSYNTKPTDITVDSADA
TPDTIKNNKRPS

[0926] Both an Active Maternal Immunization Assay and a Passive Maternal Immunization Assay were conducted on this collection of proteins.

[0927] As used herein, an Active Maternal Immunization assay refers to an in vivo protection assay where female mice are immunized with the test antigen composition. The female mice are then bred and their pups are challenged with a lethal dose of GBS. Serum titers of the female mice during the immunization schedule are measured as well as the survival time of the pups after challenge.

[0928] Specifically, the Active Maternal Immunization assays referred to herein used groups of four CD-1 female mice (Charles River Laboratories, Calco Italy). These mice were immunized intraperitoneally with the selected proteins in Freund's adjuvant at days 1, 21 and 35, prior to breeding. 6-8 weeks old mice received 20 μg protein/dose when immunized with a single antigen, 30-45 μg protein/dose (15 μg each antigen) when immunized with combination of antigens. The immune response of the dams was monitored by using serum samples taken on day 0 and 49. The female mice were bred 2-7 days after the last immunization (at approximately t=36-37), and typically had a gestation period of 21 days. Within 48 hours of birth, the pups were challenged via I.P. with GBS in a dose approximately equal to a amount which would be sufficient to kill 70-90% of unimmunized pups (as determined by empirical data gathered from PBS control groups). The GBS challenge dose is preferably administered in 50 W of THB medium. Preferably, the pup challenge takes place at 56 to 61 days after the first immunization. The challenge inocula were prepared starting from frozen cultures diluted to the appropriate concentration with THB prior to use. Survival of pups was monitored for 5 days after challenge.

[0929] As used herein, the Passive Maternal Immunization Assay refers to an in vivo protection assay where pregnant mice are passively immunized by injecting rabbit immune sera (or control sera) approximately 2 days before delivery. The pups are then challenged with a lethal dose of GBS.

[0930] Specifically, the Passive Maternal Immunization Assay referred to herein used groups of pregnant CD1 mice which were passively immunized by injecting 1 ml of rabbit immune sera or control sera via I.P., 2 days before delivery. Newborn mice (24-48 hrs after birth) are challenged via I.P. with a 70-90% lethal dose of GBS serotype III COH1. The challenge dose, obtained by diluting a frozen mid log phase culture, was administered in 50 μl of THB medium.

[0931] For both assays, the number of pups surviving GBS infection was assessed every 12 hrs for 4 days. Statistical significance was estimated by Fisher's exact test.

[0932] The results of each assay for immunization with SEQ ID NO:7, SEQ ID NO:8, PBS and GBS whole cell are set forth in Tables 1 and 2 below.

TABLE 1
Immunization

| | Alive/ | % | Fisher's |
|---|---|---|---|
| Antigen | total | Survival | exact test |
| PBS (neg control) | 13/80 | 16% | |
| GBS (whole cell) | 54/65 | 83% | P < 0.00000001 |
| GBS80 (intact) | 62/70 | 88% | P < 0.00000001 |
| GBS80 (fragment) SEQ ID 7 | 35/64 | 55% | P = 0.0000013 |
| GBS80 (fragment) SEQ ID 8 | 13/67 | 19% | P = 0.66 |

TABLE 2
Passive Maternal Immunization

| | Alive/ | % | Fisher's |
|---|---|---|---|
| Antigen | total | Survival | exact test |
| PBS (neg control) | 12/42 | 28% | |
| GBS (whole cell) | 48/52 | 92% | P < 0.00000001 |
| GBS80 (intact) | 48/55 | 87% | P < 0.00000001 |
| GBS80 (fragment) SEQ ID 7 | 45/57 | 79% | P = 0.0000006 |
| GBS80 (fragment) SEQ ID 8 | 13/54 | 24% | P = 1 |

[0933] As shown in Tables 1 and 2, immunization with the SEQ ID NO:7 GBS 80 fragment provided a substantially improved survival rate for the challenged pups than the comparison SEQ ID NO:8 GBS 80 fragment. These results indicate that the SEQ ID NO:7 GBS 80 fragment may comprise an important immunogenic epitope of GBS 80.

[0934] As discussed above, pilin motifs, containing conserved lysine (K) residues have been identified in GBS 80. The pilin motif sequences are underlined in SEQ ID NO:2, below. Conserved lysine (K) residues are marked in bold, at amino acid residues 199 and 207 and at amino acid residues 368 and 375. The pilin sequences, in particular the conserved lysine residues, are thought to be important for the formation of oligomeric, pilus-like structures of GBS 80. Preferred fragments of GBS 80 include at least one conserved lysine residue. Preferably, fragments include at least one pilin sequence.

SEQ ID NO: 2

MKLSKKLLFSAAVLTMVAGSTVEPVAQFATGMSIVRAAEVSQERPAKTTV
NIYKLQADSYKSEITSNGGIENKDGEVISNYAKLGDNVKGLQGVQFKRYK
VKTDISVDELKKLTTVEAADAKVGTILEEGVSLPQKTNAQGLVVDALDSK
SNVRYLYVEDLKNSPSNITKAYAVPFVLELPVANSTGTGFLSEINIYPKN
VVTDEPKTDKDVKKLGQDDAGYTIGEEFKWFLKSTIPANLGDYEKFEITD
KFADGLTYKSVGKIKIGSKLNRDEHYTIDEPTVDNQNTLKITFKPEKFKE
IAELLKGMTLVKNQDALDKATANTDDAAFLEIPVASTINEKAVLGKAIEN
TFELQYDHTPDKADNPKPSNPPRKPEVHTGGKRFVKKDSTETQTLGGAEF
DLLASDGTAVKWTDALIKANTNKNYIAGEAVTGQPIKLKSHTDGTFEIKG
LAYAVDANAEGTAVTYKLKETKAPEGYVIPDKEIEFTVSQTSYNTKPTDI
TVDSADATPDTIKNNKRPSIPNTGGIGTAIFVAIGAAVMAFAVKGMKRRT
KDN

[0935] E boxes containing conserved glutamic residues have also been identified in GBS 80. The E box motifs are underlined in SEQ ID NO:2 below. The conserved glutamic acid (E) residues, at amino acid residues 392 and 471, are marked in bold. The E box motifs, in particular the conserved glutamic acid residues, are thought to be important for the formation of oligomeric pilus-like structures of GBS 80. Preferred fragments of GBS 80 include at least one conserved glutamic acid residue. Preferably, fragments include at least one E box motif.

SEQ ID NO: 2

MKLSKKLLFSAAVLTMVAGSTVEPVAQFATGMSIVRAAEVSQERPAKTTV
NIYKLQADSYKSEITSNGGIENKDGEVISNYAKLGDNVKGLQGVQFKRYK
VKTDISVDELKKLTTVEAADAKVGTILEEGVSLPQKTNAQGLVVDALDSK
SNVRYLYVEDLKNSPSNITKAYAVPFVLELPVANSTGTGFLSEINIYPKN
VVTDEPKTDKDVKKLGQDDAGYTIGEEFKWFLKSTIPANLGDYEKFEITD
KFADGLTYKSVGKIKIGSKLNRDEHYTIDEPTVDNQNTLKITFKPEKFKE
IAELLKGMTLVKNQDALDKATANTDDAAFLEIPVASTINEKAVLGKAIEN
TFELQYDHTPDKADNPKPSNPPRKPEVHTGGKRFVKKDSTETQTLGGAEF
DLLASDGTAVKWTDALIKANTNKNYIAGEAVTGQPIKLKSHTDGTFEIKG
LAYAVDANAEGTAVTYKLKETKAPEGYVIPDKEIEFTVSQTSYNTKPTDI
TVDSADATPDTIKNNKRPSIPNTGGIGTAIFVAIGAAVMAFAVKGMKRRT
KDN

### GBS 104

[0936] Similarly, the following offers examples of preferred GBS 104 fragments. Nucleotide and amino acid sequences of GBS 104 sequenced from serotype V isolated strain 2603 are set forth below as SEQ ID NOS 10 and 11:

SEQ ID NO. 10

ATGAAAAAGAGACAAAAAATATGGAGAGGGTTATCAGTTACTTTACTAAT
CCTGTCCCAAATTCCATTTGGTATATTGGTACAAGGTGAAACCCAAGATA
CCAATCAAGCACTTGGAAAAGTAATTGTTAAAAAAACGGGAGACAATGCT
ACACCATTAGGCAAAGCGACTTTTGTGTTAAAAAATGACAATGATAAGTC
AGAAACAAGTCACGAAACGGTAGAGGGTTCTGGAGAAGCAACCTTTGAAA
ACATAAAACCTGGAGACTACACATTAAGAGAAGAAACAGCACCAATTGGT
TATAAAAAAACTGATAAAACCTGGAAAGTTAAAGTTGCAGATAACGGAGC
AACAATAATCGAGGGTATGGATGCAGATAAAGCAGAGAAACGAAAAGAAG
TTTTGAATGCCCAATATCCAAAATCAGCTATTTATGAGGATACAAAAGAA
AATTACCCATTAGTTAATGTAGAGGGTTCCAAAGTTGGTGAACAATACAA
AGCATTGAATCCAATAAATGGAAAAGATGGTCGAAGAGAGATTGCTGAAG
GTTGGTTATCAAAAAAAATTACAGGGGTCAATGATCTCGATAAGAATAAA
TATAAAATTGAATTAACTGTTGAGGGTAAAACCACTGTTGAAACGAAAGA
ACTTAATCAACCACTAGATGTCGTTGTGCTATTAGATAATTCAAATAGTA
TGAATAATGAAAGAGCCAATAATTCTCAAAGAGCATTAAAAGCTGGGGAA
GCAGTTGAAAAGCTGATTGATAAAATTACATCAAATAAAGACAATAGAGT
AGCTCTTGTGACATATGCCTCAACCATTTTTGATGGTACTGAAGCGACCG
TATCAAAGGGAGTTGCCGATCAAAATGGTAAAGCGCTGAATGATAGTGTA
TCATGGGATTATCATAAAACTACTTTTACAGCAACTACACATAATTACAG
TTATTTAAATTTAACAAATGATGCTAACGAAGTTAATATTCTAAAGTCAA
GAATTCCAAAGGAAGCGGAGCATATAAATGGGGATCGCACGCTCTATCAA
TTTGGTGCGACATTTACTCAAAAAGCTCTAATGAAAGCAAATGAAATTTT
AGAGACACAAAGTTCTAATGCTAGAAAAAAACTTATTTTTCACGTAACTG
ATGGTGTCCCTACGATGTCTTATGCCATAAATTTTAATCCTTATATATCA
ACATCTTACCAAAACCAGTTTAATTCTTTTTTAAATAAAATACCAGATAG
AAGTGGTATTCTCCAAGAGGATTTTATAATCAATGGTGATGATTATCAAA
TAGTAAAAGGAGATGGAGAGAGTTTTAAACTGTTTTCGGATAGAAAAGTT
CCTGTTACTGGAGGAACGACACAAGCAGCTTATCGAGTACCGCAAAATCA
ACTCTCTGTAATGAGTAATGAGGGATATGCAATTAATAGTGGATATATTT
ATCTCTATTGGAGAGATTACAACTGGGTCTATCCATTTGATCCTAAGACA
AAGAAAGTTTCTGCAACGAAACAAATCAAAACTCATGGTGAGCCAACAAC
ATTATACTTTAATGGAAATATAAGACCTAAAGGTTATGACATTTTTACTG
TTGGGATTGGTGTAAACGGAGATCCTGGTGCAACTCCTCTTGAAGCTGAG
AAATTTATGCAATCAATATCAAGTAAAACAGAAAATTATACTAATGTTGA
TGATACAAATAAAATTTATGATGAGCTAAATAAATACTTTAAAACAATTG
TTGAGGAAAAACATTCTATTGTTGATGGAAATGTGACTGATCCTATGGGA
GAGATGATTGAATTCCAATTAAAAAATGGTCAAAGTTTTACACATGATGA
TTACGTTTTGGTTGGAAATGATGGCAGTCAATTAAAAAATGGTGTGGCTC
TTGGTGGACCAAACAGTGATGGGGGAATTTTAAAAGATGTTACAGTGACT
TATGATAAGACATCTCAAACCATCAAAATCAATCATTTGAACTTAGGAAG
TGGACAAAAAGTAGTTCTTACCTATGATGTACGTTTAAAAGATAACTATA
TAAGTAACAAATTTTACAATACAAATAATCGTACAACGCTAAGTCCGAAG
AGTGAAAAAGAACCAAATACTATTCGTGATTTCCCAATTCCCAAAATTCG
TGATGTTCGTGAGTTTCCGGTACTAACCATCAGTAATCAGAAGAAAATGG
GTGAGGTTGAATTTATTAAAGTTAATAAAGACAAACATTCAGAATCGCTT
TTGGGAGCTAAGTTTCAACTTCAGATAGAAAAAGATTTTTCTGGGTATAA
GCAATTTGTTCCAGAGGGAAGTGATGTTACAACAAAGAATGATGGTAAAA
TTTATTTTAAAGCACTTCAAGATGGTAACTATAAATTATATGAAATTTCA
AGTCCAGATGGCTATATAGAGGTTAAAACGAAACCTGTTGTGACATTTAC
AATTCAAAATGGAGAAGTTACGAACCTGAAAGCAGATCCAAATGCTAATA
AAAATCAAATCGGGTATCTTGAAGGAAATGGTAAACATCTTATTACCAAC
ACTCCCAAACGCCCACCAGGTGTTTTTCCTAAAACAGGGGGAATTGGTAC
AATTGTCTATATATTAGTTGGTTCTACTTTTATGATACTTACCATTTGTT
CTTTCCGTCGTAAACAATTG

SEQ ID NO. 11

MKKRQKIWRGLSVTLLTLSQIPFGILVQGETQDTNQALGKVIVKKTGDNA
TPLGKATFVLKNDNDKSETSHETVEGSGEATFENIKPGDYTLREETAPIG
YKKTDKTWKVKVADNGATIIEGMDADKAEKRKEVLNAQYPKSAIYEDTKE
NYPLVNVEGSKVGEQYKALNPINGKDGRREIAEGWLSKKITGVNDLDKNK
YKIELTVEGKTTVETKELNQPLDVVVLLDNSNSMNNEPANNSQRALKAGE
AVEKLIDKITSNKDNRVALVTYASTIFDGTEATVSKGVADQNGKALNDSV
SWDYHKTTFTATTHNYSYLNLTNDANEVNILKSRIPKEAEHTNGDRTLYQ
FGATFTQKALMKANEILETQSSNARKKLIFHVTDGVPTMSYAINFNPYIS
TSYQNQFNSFLNKIPDRSGILQEDFIINGDDYQIVKGDGESFKLFSDRKV
PVTGGTTQAAYRVPQNQLSVMSNEGYAINSGYIYLYWRDYNWVYPFDPKT
KKVSATKQIKTHGEPTTLYFNGNIRPKGYDIFTVGIGVNGDPGATPLEAE
KFMQSISSKTENYTNVDDTNKIYDELNKYFKTIVEEKHSIVDGNVTDPMG
EMIEFQLKNGQSFTHDDYVLVGNDGSQLKNGVALGGPNSDGGILKDVTVT
YDKTSQTIKINHLNLGSGQKVVLTYDVRLKDNYISNKFYNTNNRTTLSPK
SEKEPNTIRDFPIPKIRDVREFPVLTISNQKKMGEVEFIKVNKDKHSESL
LGAKFQLQIEKDFSGYKQFVPEGSDVTTKNDGKIYFKALQDGNYKLYEIS
SPDGYIEVKTKPVVTFTIQNGEVTNLKADPNANKNQIGYLEGNGKHLITN
TPKRPPGVFPKTGGIGTTVYILVGSTFMILITCSFRRKQL

[0937] GBS 104 contains an N-terminal leader or signal sequence region which is indicated by the underlined sequence at the beginning of SEQ ID NO 11 above. In one embodiment, one or more amino acid sequences from the leader or signal sequence region of GBS 104 are removed. An example of such a GBS 104 fragment is set forth below as SEQ ID NO 12.

SEQ ID NO 12

GETQDTNQALGKVIVKKTGDNATPLGKATFVLKNDNDKSETSHETVEGSG
EATFENIKPGDYTLREETAPIGYKKTDKTWKVKVADNGATIIEGMDADKA
EKRKEVLNAQYPKSAIYEDTKENYPLVNVEGSKVGEQYKALNPINGKDGR
REIAEGWLSKKITGVNDLDKNKYKIELTVEGKTTVETKELNQPLDVVVLL
DNSNSMNNERANNSQRALKAGEAVEKLIDKITSNKDNRVALVTYASTIFD
GTEATVSKGVADQNGKALNDSVSWDYHKTTFTATTHNYSYLNLTNDANEV
NILKSRIPKEAEHINGDRTLYQFGATFTQKALMKANEILETQSSNARKKL
IFHVTDGVPTMSYAINFNPYISTSYQNQFNSFLNKIPDRSGILQEDFIIN
GDDYQIVKGDGESFKLFSDRKVPVTGGTTQAAYRVPQNQLSVMSNEGYAI
NSGYIYLYWRDYNWVYPFDPKTKKVSATKQIKTHGEPTTLYFNGNIRPKG
YDIFTVGIGVNGDPGATPLEAEKFMQSISSKTENYTNVDDTNKIYDELNK
YFKTIVEEKHSIVDGNVTDPMGEMIEFQLKNGQSFTHDDYVLVGNDGSQL
KNGVALGGPNSDGGILKDVTVTYDKTSQTIKINHLNLGSGQKVVLTYDVR
LKDNYISNKFYNTNNRTTLSPKSEKEPNTIRDFPIPKIRDVREFPVLTIS
NQKKMGEVEFIKVNKDKHSESLLGAKFQLQIEKDFSGYKQFVPEGSDVTT
KNDGKIYFKALQDGNYKLYEISSPDGYIEVKTKPVVTFTIQNGEVTNLKA
DPNANKNQIGYLEGNGKHLITNTPKRPPGVFPKTGGIGTIVYILVGSTFM
ILTICSFRRKQL

[0938] GBS 104 contains a C-terminal transmembrane and/or cytoplasmic region which is indicated by the underlined region near the end of SEQ ID NO 11 above. In one embodiment, one or more amino acids from the transmembrane or cytoplasmic regions are removed. An example of such a GBS 104 fragment is set forth below as SEQ ID NO 13.

SEQ ID NO: 13

MKKRQKIWRGLSVTLLILSQIPFGILVQGETQDTNQALGKVIVKKTGDNA
TPLGKATFVLKNDNDKSETSHETVEGSGEATFENIKPGDYTLREETAPIG
YKKTDKTWKVKVADNGATIIEGMDADKAEKRKEVLNAQYPKSAIYEDTKE
NYPLVNVEGSKVGEQYKALNPINGKDGRREIAEGWLSKKITGVNDLDKNK
YKIELTVEGKTTVETKELNQPLDVVVLLDNSNSMNNERANNSQRALKAGE
AVEKLIDKITSNKDNRVALVTYASTIFDGTEATVSKGVADQNGKALNDSV
SWDYHKTTFTATTHNYSYLNLTNDANEVNILKSRIPKEAEHINGDRTLYQ
FGATFTQKALMKANEILETQSSNARKKLIFHVTDGVPTMSYAINFNPYIS
TSYQNQFNSFLNKIPDRSGILQEDFIINGDDYQIVKGDGESFKLFSDRKV
PVTGGTTQAAYRVPQNQLSVMSNEGYAINSGYIYLYWRDYNWVYPFDPKT
KKVSATKQIKTHGEPTTLYFNGNIRPKGYDIFTVGIGVNGDPGATPLEAE
KFMQSISSKTENYTNVDDTNKIYDELNKYFKTIVEEKHSIVDGNVTDPMG
EMIEFQLKNGQSFTHDDYVLVGNDGSQLKNGVALGGPNSDGGILKDVTVT
YDKTSQTIKINHLNLGSGQKVVLTYDVRLKDNYISNKFYNTNNRTTLSPK
SEKEPNTIRDFPIPKIRDVREFPVLTISNQKKMGEVEFIKVNKDKHSESL
LGAKFQLQIEKDFSGYKQFVPEGSDVTTKNDGKTYFKALQDGNYKLYEIS
SPDGYIEVKTKPVVTFTIQNGEVTNLKADFNANKNQIGYLEGNGKHLITN
T

[0939] In one embodiment, one or more amino acids from the leader or signal sequence region and one or more amino acids from the transmembrane or cytoplasmic regions are removed. An example of such a GBS 104 fragment is set forth below as SEQ ID NO 14.

SEQ ID NO: 14

GETQDTNQALGKVIVKKTGDNATPLGKATFVLKNDNDKSETSHETVEGSG
EATFENIKPGDYTLREETAPIGYKKTDKTWKVKVADNGATIIEGMDADKA
EKRKEVLNAQYPKSAIYEDTKENYPLVNVEGSKVGEQYKALNPINGKDGR
REIAEGWLSKKITGVNDLDKNKYKIELTVEGKTTVETKELNQPLDVVVLL
DNSNSMNNERANNSQRALKAGEAVEKLIDKITSNKDNRVALVTYASTIFD
GTEATVSKGVADQNGKALNDSVSWDYHKTTFTATTHNYSYLNLTNDANEV
NILKSRIPKEAEHINGDRTLYQFGATFTQKALMKANEILETQSSNARKKL
IFHVTDGVPTMSYAINFNPYISTSYQNQFNSFLNKIPDRSGILQEDFIIN
GDDYQIVKGDGESFKLFSDRKVPVTGGTTQAAYRVPQNQLSVMSNEGYAI
NSGYIYLYWRDYNWVYPFDPKTKKVSATKQIKTHGEPTTLYFNGNIRPKG
YDIFTVGIGVNGDPGATPLEAEKFMQSISSKTENYTNVDDTNKIYDELNK
YFKTIVEEKHSIVDGNVTDPMGEMIEFQLKNGQSFTHDDYVLVGNDGSQL
KNGVALGGPNSDGGILKDVTVTYDKTSQTIKINHLNLGSGQKVVLTYDVR
LKDNYISNKFYNTNNRTTLSPKSEKEPNTIRDFPIPKIRDVREFPVLTIS
NQKKMGEVEFIKVNKDKHSESLLGAKFQLQIEKDFSGYKQFVPEGSDVTT
KNDGKIYFKALQDGNYKLYEISSPDGYIEVKTKPVVTFTIQNGEVTNLKA
DPNANKNQIGYLEGNGKHLITNT

[0940] GBS 104, like GBS 80, contains an amino acid motif indicative of a cell wall anchor: SEQ ID NO:123 FPKTG (shown in italics in SEQ ID NO:11 above). In some recombinant host cell systems, it may be preferable to remove this motif to facilitate secretion of a recombinant GBS 104 protein from the host cell. Accordingly, in one preferred fragment of GBS 104 for use in the invention, only the transmembrane and/or cytoplasmic regions and the cell wall anchor motif are removed from GBS 104. Alternatively, in some recombinant host cell systems, it may be preferable to use the cell wall anchor motif to anchor the recombinantly expressed protein to the cell wall. The extracellular domain of the expressed protein may be cleaved during purification or the recombinant protein may be left attached to either inactivated host cells or cell membranes in the final composition.

[0941] Two pilin motifs, containing conserved lysine (K) residues, have been identified in GBS 104. The pilin motif sequences are underlined in SEQ ID NO:11, below. Conserved lysine (K) residues are marked in bold, at amino acid residues 141 and 149 and at amino acid residues 499 and 507. The pilin sequence, in particular the conserved lysine residues, are thought to be important for the formation of oligomeric, pilus-like structures of GBS 104. Preferred fragments of GBS 104 include at least one conserved lysine residue. Preferably, fragments include at least one pilin sequence.

SEQ ID NO. 11

MKKRQKIWRGLSVTLLILSQIPFGILVQGETQDTNQALGKVIVKKTGDNA
TPLGKATFVLKNDNDKSETSHETVEGSGEATFENIKPGDYTLREETAPIG
YKKTDKTWKVKVADNGATIIEGMDADKAEKRKEVLNAQYPKSAIYEDTKE
NYPLVNVEGSKVGEQYKALNPINGKDGRREIAEGWLSKKITGVNDLDKNK
YKIELTVEGKTTVETKELNQPLDVVVLLDNSNSMNNERANNSQRALKAGE
AVEKLIDKITSNKDNRVALVTYASTIFDGTEATVSKGVADQNGKALNDSV
SWDYHKTTFTATTHNYSYLNLTNDANEVNILKSRIPKEAEHINGDRTLYQ
FGATFTQKALMKANEILETQSSNARKKLIFHVTDGVPTMSYAINFNPYIS
TSYQNQFNSFLNKIPDRSGILQEDFIINGDDYQIVKGDGESFKLFSDRKV
PVTGGTTQAAYRVPQNQLSVMSNEGYAINSGYIYLYWRDYNWVYPFDPKT
KKVSATKQIKTHGEPTTLYFNGNIRPKGYDIFTVGIGVNGDPGATPLEAE
KFMQSISSKTENYTNVDDTNKIYDELNKYFKTIVEEKHSIVDGNVTDPMG
EMIEFQLKNGQSFTHDDYVLVGNDGSQLKNGVALGGPNSDGGILKDVTVT
YDKTSQTIKINHLNLGSGQKVVLTYDVRLKDNYISNKFYNTNNRTTLSPK
SEKEPNTIRDFPIPKIRDVREFPVLTISNQKKMGEVEFIKVNKDKHSESL
LGAKFQLQIEKDFSGYKQFPFEGSDVTTKNDGKIYFKALQDGNYKLYEIS
SPDGYIEVKTKPVVTFTIQNGEVTNLKADPNANKNQIGYLEGNGKHLITN
TPKRPPGVFPKTGGIGTIVYILVGSTFMILTICSFRRKQL

[0942] Two E boxes containing a conserved glutamic residues have also been identified in GBS 104. The E box motifs are underlined in SEQ ID NO:11 below. The conserved glutamic acid (E) residues, at amino acid residues 94 and 798, are marked in bold. The E box motifs, in particular the conserved glutamic acid residues, are thought to be important for the formation of oligomeric pilus-like structures of GBS 104. Preferred fragments of GBS 104 include at least one conserved glutamic acid residue. Preferably, fragments include at least one E box motif.

SEQ ID NO. 11

MKKRQKIWRGLSVTLLILSQIPFGILVQGETQDTNQALGKVIVKKTGDNA
TPLGKATFVLKNDNDKSETSHETVEGSGEATFENIKPGDYTLREETAPIG
YKKTDKTWKVKVADNGATIIEGMDADKAEKRKEVLNAQYPKSAIYEDTKE
NYPLVNVEGSKVGEQYKALNPINGKDGRREIAEGWLSKKITGVNDLDKNK
YKIELTVEGKTTVETKELNQPLDVVVLLDNSNSMNNERANNSQRALKAGE
AVEKLIDKITSNKDNRVALVTYASTIFDGTEATVSKGVADQNGKALNDSV
SWDYHKTTFTATTHNYSYLNLTNDANEVNILKSRIPKEAEHINGDRTLYQ
FGATFTQKALMKANEILETQSSNARKKLIFHVTDGVPTMSYAINFNPYIS
TSYQNQFNSFLNKIPDRSGILQEDFIINGDDYQIVKGDGESFKLFSDRKV
PVTGGTTQAAYRVPQNQLSVMSNEGYAINSGYIYLYWRDYNWVYPFDPKT
KKVSATKQIKTHGEPTTLYFNGNIRPKGYDIFTVGIGVNGDPGATPLEAE
KFMQSISSKTENYTNVDDTNKIYDELNKYFKTIVEEKHSIVDGNVTDPMG
EMIEFQLKNGQSFTHDDYVLVGNDGSQLKNGVALGGPNSDGGILKDVTVT
YDKTSQTIKINHLNLGSGQKVVLTYDVRLKDNYISNKFYNTNNRTTLSPK
SEKEPNTIRDFPIPKIRDVREFPVLTISNQKKMGEVEFIKVNKDKHSESL
LGAKFQLQIEKDFSGYKQFVPEGSDVTTKNDGKIYFKALQDGNYKLYEIS
SPDGYIEVKTKPVVTFTIQNGEVTNLKADPNANKNQIGYLEGNGKHLITN
TPKRPPGVFPKTGGIGTIVYILVGSTFMILTICSFRRKQL

### GBS 067

[0943] The following offers examples of preferred GBS 067 fragments. Nucleotide and amino acid sequence of GBS 067 sequences from serotype V isolated strain 2603 are set forth below as SEQ ID NOS: 15 and 16.

SEQ ID NO: 15

ATGAGAAAATACCAAAAATTTTCTAAAATATTGACGTTAAGTCTTTTTTG
TTTGTCGCAAATACCGCTTAATACCAATGTTTTAGGGGAAAGTACCGTAC
CGGAAAATGGTGCTAAAGGAAAGTTAGTTGTTAAAAAGACAGATGACCAG
AACAAACCACTTTCAAAAGCTACCTTTGTTTTAAAAACTACTGCTCATCC
AGAAAGTAAAATAGAAAAAGTAACTGCTGAGCTAACAGGTGAAGCTACTT
TTGATAATCTCATACCTGGAGATTATACTTTATCAGAAGAAACAGCGCCC
GAAGGTTATAAAAAGACTAACCAGACTTGGCAAGTTAAGGTTGAGAGTAA
TGGAAAAACTACGATACAAAATAGTGGTGATAAAAATTCCACAATTGGAC
AAAATCAGGAAGAACTAGATAAGCAGTATCCCCCCACAGGAATTTATGAA
GATACAAAGGAATCTTATAAACTTGAGCATGTTAAAGGTTCAGTTCCAAA
TGGAAAGTCAGAGGCAAAAGCAGTTAACCCATATTCAAGTGAAGGTGAGC
ATATAAGAGAAATTCCAGAGGGAACATTATCTAAACGTATTTCAGAAGTA
GGTGATTTAGCTCATAATAAATATAAAATTGAGTTAACTGTCAGTGGAAA
AACCATAGTAAAACCAGTGGACAAACAAAAGCCGTTAGATGTTGTCTTCG
TACTCGATAATTCTAACTCAATGAATAACGATGGCCCAAATTTTCAAAGG
CATAATAAAGCCAAGAAAGCTGCCGAAGCTCTTGGGACCGCAGTAAAAGA
TATTTTAGGAGCAAACAGTGATAATAGGGTTGCATTAGTTACCTATGGTT
CAGATATTTTTGATGGTAGGAGTGTAGATGTCGTAAAAGGATTTAAAGAA
GATGATAAATATTATGGCCTTCAAACTAAGTTCACAATTCAGACAGAGAA
TTATAGTCATAAACAATTAACAAATAATGCTGAAGAGATTATAAAAAGGA
TTCCGACAGAAGCTCCTAAAGCTAAGTGGGGATCTACTACCAATGGATTA
ACTCCAGAGCAACAAAAGGAGTACTATCTTAGTAAAGTAGGAGAAACATT
TACTATGAAAGCCTTCATGGAGGCAGATGATATTTTGAGTCAAGTAAATC
GAAATAGTCAAAAAATTATTGTTCATGTAACTGATGGTGTTCCTACGAGA
TCATATGCTATTAATAATTTTAAACTGGGTGCATCATATGAAAGCCAATT
TGAACAAATGAAAAAAAATGGATATCTAAATAAAAGTAATTTTCTACTTA
CTGATAAGCCCGAGGATATAAAAGGAAATGGGGAGAGTTACTTTTTGTTT
CCCTTAGATAGTTATCAAACACAGATAATCTCTGGAAACTTACAAAAACT
TCATTATTTAGATTTAAATCTTAATTACCCTAAAGGTACAATTTATCGAA
ATGGACCAGTGAAAGAACATGGAACACCAACCAAACTTTATATAAATAGT
TTAAAACAGAAAAATTATGACATTTTTAATTTTGGTATCGATATATCTGG
TTTTAGACAAGTTTATAATGAGGAGTATAAGAAAAATCAAGATGGTACTT
TTCAAAAATTGAAAGAGGAAGCTTTTAAACTTTCAGATGGAGAAATCACA
GAACTAATGAGGTCGTTCTCTTCCAAACCTGAGTACTACACCCCTATCGT
AACTTCAGCCGATACATCTAACAATGAAATTTTATCTAAAATTCAGCAAC
AATTTGAAACGATTTTAACAAAAGAAAACTCAATTGTTAATGGAACTATC
GAAGATCCTATGGGTGATAAAATCAATTTACAGCTTGGTAATGGACAAAC
ATTACAGCCAAGTGATTATACTTTACAGGGAAATGATGGAAGTGTAATGA
AGGATGGTATTGCAACTGGTGGGCCTAATAATGATGGTGGAATACTTAAG
GGGGTTAAATTAGAATACATCGGAAATAAACTCTATGTTAGAGGTTTGAA
TTTAGGAGAAGGTCAAAAAGTAACACTCACATATGATGTGAAACTAGATG
ACAGTTTTATAAGTAACAAATTCTATGACACTAATGGTAGAACAACATTG
AATCCTAAGTCAGAGGATCCTAATACACTTAGAGATTTTCCAATCCCTAA
AATTCGTGATGTGAGAGAATATCCTACAATAACGATTAAAAACGAGAAGA
AGTTAGGTGAAATTGAATTTATAAAAGTTGATAAAGATAATAATAAGTTG
CTTCTCAAAGGAGCTACGTTTGAACTTCAAGAATTTAATGAAGATTATAA
ACTTTATTTACCAATAAAAAATAATAATTCAAAAGTAGTGACGGGAGAAA
ACGGCAAAATTTCTTACAAAGATTTGAAAGATGGCAAATATCAGTTAATA
GAAGCAGTTTCGCCGGAGGATTATCAAAAAATTACTAATAAACCAATTTT
AACTTTTGAAGTGGTTAAAGGATCGATAAAAAATATAATAGCTGTTAATA
AACAGATTTCTGAATATCATGAGGAAGGTGACAAGCATTTAATTACCAAC
ACGCATATTCCACCAAAAGGAATTATTCCTATGACAGGTGGGAAAGGAAT
TCTATCTTTCATTTTAATAGGTGGAGCTATGATGTCTATTGCAGGTGGAA
TTTATATTTGGAAAAGGTATAAGAAATCTAGTGATATGTCCATCAAAAAA
GAT

SEQ ID NO: 16

MRKYQKFSKILTLSLFCLSQIPLNTNVLGESTVPENGAKGKLVVKKTDDQ
NKPLSKATFVLKTTAHPESKIEKVTAELTGEATFDNLIPGDYTLSEETAP
EGYKKTNQTWQVKVESNGKTTIQNSGDKNSTIGQNQEELDKQYPPTGIYE
DTKESYKLEHVKGSVPNGKSEAKAVNPYSSEGEHIREIPEGTLSKRISEV
GDLAHNKYKIELTVSGKTIVKPVDKQKPLDVVFVLDNSNSMNNDGPNFQR
HNKAKKAAEALGTAVKDILGANSDNRVALVTYGSDIFDGRSVDVVKGFKE
DDKYYGLQTKFTIQTENYSHKQLTNNAEEIIKRIPTEAPKAKWGSTTNGL
TPEQQKEYYLSKVGETFTMKAFMEADDILSQVNRNSQKIIVHVTDGVPTR
SYAINNFKLGASYESQFEQMKKNGYLNKSNFLLTDKPEDIKGNGESYFLF
PLDSYQTQIISGNLQKLHYLDLNLNYPKGTIYRNGPVKEHGTPTKLYINS
LKQKNYDIFNFGIDISGFRQVYNEEYKKNQDGTFQKLKEEAFKLSDGEIT
ELMRSFSSKPEYYTPIVTSADTSNNEILSKIQQQFETILTKENSIVNGTI
EDPMGDKINLQLGNGQTLQPSDYTLQGNDGSVMKDGTATGGPNNDGGILK
GVKLEYIGNKLYVRGLNLGEGQKVTLTYDVKLDDSFISNKFYDTNGRTTL
NPKSEDPNTLRDFPIPKIRDVREYPTITIKNEKKLGEIEFIKVDKDNNKL
LLKGATFELQEFNEDYKLYLPIKNNNSKVVTGENGKISYKDLKDGKYQLI
EAVSPEDYQKITNKPILTFEVVKGSIKNIIAVNKQISEYHEEGDKHLITN
THIPPKGIIPMTGGKGILSFILIGGAMMSIAGGIYIWKRYKKSSDMSIKK
D

[0944] GBS 067 contains a C-terminus transmembrane region which is indicated by the underlined region closest to the C-terminus of SEQ ID NO:16 above. In one embodiment, one or more amino acids from the transmembrane region is removed and or the amino acid is truncated before the transmembrane region. An example of such a GBS 067 fragment is set forth below as SEQ ID NO:17.

SEQ ID NO: 17

MRKYQKFSKILTLSLFCLSQIPLNTNVLGESTVPENGAKGKLVVKKTDDQ
NKPLSKATFVLKTTAHPESKIEKVTAELTGEATFDNLIPGDYTLSEETAP
EGYKKTNQTWQVKVESNGKTTIQNSGDKNSTIGQNQEELDKQYPPTGIYE
DTKESYKLEHVKGSVPNGKSEAKAVNPYSSEGEHIREIPEGTLSKRISEV
GDLAHNKYKIELTVSGKTIVKPVDKQKPLDVVFVLDNSNSMNNDGPNFQR
HNKAKKAAEALGTAVKDILGANSDNRVALVTYGSDIFDGRSVDVVKGFKE
DDKYYGLQTKFTIQTENYSHKQLTNNAEEIIKRIPTEAPKAKWGSTTNGL
TPEQQKEYYLSKVGETFTMKAFMEADDILSQVNRNSQKIIVHVTDGVPTR
SYAINNFKLGASYESQFEQMKKNGYLNKSNFLLTDKPEDIKGNGESYFLF
PLDSYQTQIISGNLQKLHYLDLNLNYPKGTIYRNGPVKEHGTPTKLYINS
LKQKNYDIFNFGIDISGFRQVYNEEYKKNQDGTFQKLKEEAFKLSDGEIT
ELMRSFSSKPEYYTPIVTSADTSNNEILSKIQQQFETILTKENSIVNGTI
EDPMGDKINLQLGNGQTLQPSDYTLQGNDGSVMKDGIATGGPNNDGGILK
GVKLEYIGNKLYVRGLNLGEGQKVTLTYDVKLDDSFISNKFYDTNGRTTL
NPKSEDPNTLRDFPIPKIRDVREYPTITIKNEKKLGEIEFIKVDKDNNKL
LLKGATFELQEFNEDYKLYLPIKNNNSKVVTGENGKISYKDLKDGKYQLI
EAVSPEDYQKITNKPILTFEVVKGSIKNIIAVNKQISEYHEEGDKHLITN
THIPPKGIIPMTGGKGILS

[0945] GBS 067 contains an amino acid motif indicative of a cell wall anchor (an LPXTG (SEQ ID NO:122) motif): SEQ ID NO:18 I PMTG. (shown in italics in SEQ ID NO:16 above). In some recombinant host cell systems, it may be preferable to remove this motif to facilitate secretion of a recombinant GBS 067 protein from the host cell. Accordingly, in one preferred fragment of GBS 067 for use in the invention, the transmembrane and the cell wall anchor motif are removed from GBS 67. An example of such a GBS 067 fragment is set forth below as SEQ ID NO:19.

SEQ ID NO: 19

MRKYQKFSKILTLSLFCLSQIPLNTNVLGESTVPENGAKGKLVVKKTDDQ
NKPLSKATFVLKTTAHPESKIEKVTAELTGEATFDNLIPGDYTLSEETAP
EGYKKTNQTWQVKVESNGKTTIQNSGDKNSTIGQNQEELDKQYPPTGIYE
DTKESYKLEHVKGSVPNGKSEAKAVNPYSSEGEHIREIPEGTLSKRISEV
GDLAHNKYKIELTVSGKTIVKPVDKQKPLDVVFVLDNSNSMNNDGPNFQR
HNKAKKAAEALGTAVKDILGANSDNRVALVTYGSDIFDGRSVDVVKGFKE
DDKYYGLQTKFTIQTENYSHKQLTNNAEEIIKRIPTEAPKAKWGSTTNGL
TPEQQKEYYLSKVGETFTMKAFMEADDILSQVNRNSQKIIVHVTDGVPTR
SYAINNFKLGASYESQFEQMKKNGYLNKSNFLLTDKPEDIKGNGESYFLF
PLDSYQTQIISGNLQKLHYLDLNLNYPKGTIYRNGPVKEHGTPTKLYINS
LKQKNYDIFNFGIDISGFRQVYNEEYKKNQDGTFQKLKEEAFKLSDGEIT
ELMRSFSSKPEYYTPIVTSADTSNNEILSKIQQQFETILTKENSIVNGTI
EDPMGDKINLQLGNGQTLQPSDYTLQGNDGSVMKDGIATGGPNNDGGILK
GVKLEYIGNKLYVRGLNLGEGQKVTLTYDVKLDDSFISNKFYDTNGRTTL
NPKSEDPNTLRDFPIPKIRDVREYPTITIKNEKKLGEIEFIKVDKDNNKL
LLKGATFELQEFNEDYKLYLPIKNNNSKVVTGENGKISYKDLKDGKYQLI
EAVSPEDYQKITNKPILTFEVVKGSIKNIIAVNKQISEYHEEGDKHLITN
THIPPKGI

[0946] Alternatively, in some recombinant host cell systems, it may be preferable to use the cell wall anchor motif to anchor the recombinantly expressed protein to the cell wall. The extracellular domain of the expressed protein may be cleaved during purification or the recombinant protein may be left attached to either inactivated host cells or cell membranes in the final composition.

[0947] Three pilin motifs, containing conserved lysine (K) residues have been identified in GBS 67. The pilin motif sequences are underlined in SEQ ID NO:16, below. Conserved lysine (K) residues are marked in bold, at amino acid residues 478 and 488, at amino acid residues 340 and 342, and at amino acid residues 703 and 717. The pilin sequences, in particular the conserved lysine residues, are thought to be important for the formation of oligomeric, pilus-like structures of GBS 67. Preferred fragments of GBS 67 include at least one conserved lysine residue. Preferably, fragments include at least one pilin sequence.

SEQ ID NO: 16

MRKYQKFSKILTLSLFCLSQIPLNTNVLGESTVPENGAKGKLVVKKTDDQ
NKPLSKATFVLKTTAHPESKIEKVTAELTGEATFDNLIPGDYTLSEETAP
EGYKKTNQTWQVKVESNGKTTIQNSGDKNSTIGQNQEELDKQYPPTGIYE
DTKESYKLEHVKGSVPNGKSEAKAVNPYSSEGEHIREIPEGTLSKRISEV
GDLAHNKYKIELTVSGKTIVKPVDKQKPLDVVFVLDNSNSMNNDGPNFQR
HNKAKKAAEALGTAVKDILGANSDNRVALVTYGSDIFDGRSVDVVKGFKE
DDKYYGLQTKFTIQTENYSHKQLTNNAEEIIKRIPTEAPKAKWGSTTNGL
TPEQQKEYYLSKVGETFTMKAFMEADDILSQVNRNSQKIIVHVTDGVPTR
SYAINNFKLGASYESQFEQMKKNGYLNKSNFLLTDKPEDIKGNGESYFLF
PLDSYQTQIISGNLQKLHYLDLNLNYPKGTIYRNGPVKEHGTPTKLYINS
LKQKNYDIFNFGIDISGFRQVYNEEYKKNQDGTFQKLKEEAFKLSDGEIT
ELMRSFSSKPEYYTPIVTSADTSNNEILSKIQQQFETILTKENSIVNGTI
EDPMGDKINLQLGNGQTLQPSDYTLQGNDGSVMKDGIATGGPNNDGGILK
GVKLEYIGNKLYVRGLNLGEGQKVTLTYDVKLDDSFISNKFYDTNGRTTL
NPKSEDPNTLRDFPIPKIRDVREYPTITIKNEKKLGEIEFIKVDKDNNKL
LLKGATFELQEFNEDYKLYLPIKNNNSKVVTGENGKISYKDLKDGKYQLI
EAVSPEDYQKITNKPILTFEVVKGSIKNIIAVNKQISEYHEEGDKHLITN
THIPPKGIIPMTGGKGILSFILIGGAMMSIAGGIYIWKRYKKSSDMSIKK
D

[0948] Two E boxes containing conserved glutamic residues have also been identified in GBS 67. The E box motifs are underlined in SEQ ID NO:16 below. The conserved glutamic acid (E) residues, at amino acid residues 96 and 801, are marked in bold. The E box motifs, in particular the conserved glutamic acid residues, are thought to be important for the formation of oligomeric pilus-like structures of GBS 67. Preferred fragments of GBS 67 include at least one conserved glutamic acid residue. Preferably, fragments include at least one E box motif.

SEQ ID NO: 16

MRKYQKFSKILTLSLFCLSQIPLNTNVLGESTVPENGAKGKLVVKKTDDQ
NKPLSKATFVLKTTAHPESKIEKVTAELTGEATFDNLIPGDYTLSEETAP
EGYKKTNQTWQVKVESNGKTTIQNSGDKNSTIGQNQEELDKQYPPTGIYE
DTKESYKLEHVKGSVPNGKSEAKAVNPYSSEGEHIREIPEGTLSKRISEV
GDLAHNKYKIELTVSGKTIVKPVDKQKPLDVVFVLDNSNSMNNDGPNFQR
HNKAKKAAEALGTAVKDILGANSDNRVALVTYGSDIFDGRSVDVVKGFKE
DDKYYGLQTKFTIQTENYSHKQLTNNAEEIIKRIPTEAPKAKWGSTTNGL
TPEQQKEYYLSKVGETFTMKAFMEADDILSQVNRNSQKIIVHVTDGVPTR
SYAINNFKLGASYESQFEQMKKNGYLNKSNFLLTDKPEDIKGNGESYFLF
PLDSYQTQIISGNLQKLHYLDLNLNYPKGTIYRNGPVKEHGTPTKLYINS
LKQKNYDIFNFGIDISGFRQVYNEEYKKNQDGTFQKLKEEAFKLSDGEIT
ELMRSFSSKPEYYTPIVTSADTSNNEILSKIQQQFETILTKENSIVNGTI
EDPMGDKINLQLGNGQTLQPSDYTLQGNDGSVMKDGIATGGPNNDGGILK
GVKLEYIGNKLYVRGLNLGEGQKVTLTYDVKLDDSFISNKFYDTNGRTTL
NPKSEDPNTLRDFPIPKIRDVREYPTITIKNEKKLGEIEFIKVDKDNNKL
LLKGATFELQEFNEDYKLYLPIKNNNSKVVTGENGKISYKDLKDGKYQLI
EAVSPEDYQKITNKPILTFEVVKGSIKNIIAVNKQISEYHEEGDKHLITN
THIPPKGIIPMTGGKGILSFILIGGAMMSIAGGIYIWKRYKKSSDMSIKK
D

[0949] Predicted secondary structure for the GBS 067 amino acid sequence is set forth in FIG. 33. As shown in this FIG., GBS 067 contains several regions predicted to form alpha helical structures. Such alpha helical regions are likely to form coiled-coil structures and may be involved in oligomerization of GBS 067.

[0950] The amino acid sequence for GBS 067 also contains a region which is homologous to the Cna_B domain of the Staphylococcus aureus collagen-binding surface protein (pfam05738). Although the Cna_B region is not thought to mediate collagen binding, it is predicted to form a beta sandwich structure. In the Staph aureus protein, this beta sandwich structure is through to form a stalk that presents the ligand binding domain away from the bacterial cell surface. This same amino acid sequence region is also predicted to be an outer membrane protein involved in cell envelope biogenesis.

[0951] The amino acid sequence for GBS 067 contains a region which is homologous to a von Willebrand factor (vWF) type A domain. The vWF type A domain is present at amino acid residues 229-402 of GBS 067 as shown in SEQ ID NO:16. This type of sequence is typically found in extracellular proteins such as integrins and it thought to mediate adhesion, including adhesion to collagen, fibronectin, and fibrinogen, discussed above.

[0952] Because applicants have identified GBS 67 as a surface exposed protein on GBS and because GBS 67 may be involved in GBS adhesion, the immunogenicity of the GBS 67 protein was examined in mice. The results of an immunization assay with GBS 67 are set forth in Table 48, below.

TABLE 48
GBS 67 Protects Mice in an Immunization Assay

| Challenge | GBS 67 immungen | | PBS immunogen | | |
|---|---|---|---|---|---|
| GBS strain | dead/ | | dead/ | | FACS |
| (serotype) | treated | % survival | treated | % survival | Δmean |
| 3050 (II) | 0/30 | 100 | 29/49 | 41 | 460 |
| CJB111 (V) | 76/185 | 59 | 143/189 | 24 | 481 |
| 7357 b (Ib) | 34/56 | 39 | 65/74 | 12 | 316 |

[0953] As shown in Table 48, immunization with GBS 67 provides a substantially improved survival rate for challenged mice relative to negative control, PBS, immunized mice. These results indicate that GBS 67 may comprise an immunogenic composition of the invention.

### GBS 59

[0954] The following offers examples of GBS 59 fragments. Nucleotide and amino acid sequences of GBS 59 sequenced from serotype V isolated strain 2603 are set forth below as SEQ ID NOS: 125 and 126. The GBS 59 polypeptide of SEQ ID NO:126 is referred to as SAG1407.

SEQ ID NO: 125

TTAAGCTTCCTTTGATTGGCGTCTTTTCATGATAACTACTGCTCCAAGCA
TAATGCTTAAACCAATAATTGTGAAAAGAATTGTACCAATACCACCTGTT
TGTGGGATTGTTACCTTTTTATTTTCTACACGTGTCGCATCTTTTTGGTT
GCTGTTAGCAACGTAGTCAATGTTACCACCTGTTATGTATGACCCTTGAT
TAACTACAAACTTAATATTACCTGCCAACTTAGCAAATCCTGCTGGAGCA
AGTGTTTCTTCAAGGTTGTAAGTACCGTCTGCAAGACCTGTAACTTCAAA
TTGACCTTGATCGTTTGAAGTGTAGGTAATGGCTCTAGCCTTATCTGTTA
TCCACTCATAAGCTGTACGAGCCTCAATGAAGGCTGCATCGTAATCTGCT
TGTTTAGTTTTGATAAGTTCTTTTGCAGTAATTCCTTTTTCACCTTTTTG
GTCTGTTGCAGACAACTTGTTATAAGCAGCGATAGCTTCATCTAAAGCTA
TTTTCTTAGCAGCTAAAGTTTTTTGACCTTCTGATTGATCTGCTTTAAGA
GCAAGGTATTTACCTGCTGAGTTTTTCACAACGAATTGTGCACCAGCCAA
ACGGTCACCTTGTTCATTAGTTTTGACAAATTTCTTACCATGAGTTTCAA
CTTTTGGTTCAGTTGGGTTCAATGGTGTTGGGTTATCAGAATCTTTGGTA
TTGGTAATGGTTACTTTACCATTTTCTAGATTTATTGCACTTCCGTAACC
AGAAACACGTTCTGAGATCATGTATGATTTGTTTTCTAGACCAGTGAATT
TACCCGAGAAGTTACCAGATACTTCAAATTTGATACCATTTCCAAGGTCG
ATTGTACCTTTAGATGTTTTTGTCAATGATACTGAAGCAACAGTTTTATC
TTTATCTTTCAATGTGTAAACAACGTTTACACCATCAGGTGCAATTCCGT
CAGACCAAGTTTTAGCAACTGTTACTTCACCCTTTGAAGGTGTAACAGGA
AGTTCAGTCAAGTCTTTACCTGGTTTGTTACCATACGACAATTTGATATC
ATTGGATTCTGGATTATCAATAATTGCTTGACCATTAACAGTAGCACTAT
AAGTCAATGTAAATTCAATATCAGCTGTTTTAGCTGCTTTTTCCAATTTG
CCCAATCCATCAGCTGTGAATTTTAATGTGAAACCACGGGCATCAATGCT
AAGTTCATAGTCTGTATCCTTAGCAAAAGTTTCTGTAGTTCCTGAAGCTT
TAAGGCTAACAGTTGAACCCATTGTCAAACCATTTGACATTATATCTGTC
CAAACCAAGTTTTCGTATTTAGAACCTTTGTGAATTTTTGTTTTAACTTC
ATAAGGAACAACTTTACCGATTTCAGCAGTAGCAGTTGCTTTGTCACGTG
CATAATTACCATAATTTGCGCCAGCTGTCAAAAGTCTATTAACATCTGTC
AATGCTGTCAAATCGTTTGTTTTAGCAAAGTTTTTATCAATTTCTGGTTT
TTCTTCAGTGTTCTTTGGATAAACATGGGCATCAGCAACAACACCATCTT
CATTTACCAATGGAAGAGTGATGTTAACTGGAACCGCTTTTGAAGCAGCC
AGGAGGGAACCATTATTGTTGTAAGTAGATTTTGATTTAACTTCAACAAT
TTTAAACTCGCCTTTCAATCCTTTGGTGTTGAAAACAAGTCCAGTATCTC
CCTCTGGTGTCAATCCAGACACGGCCTCATCAATATTTACTGTTATTTCA
GGAGTACCATCTTTATTAATTAAGGCTGGTGTTAATTTGTTACCTTCTTT
TGCCTTAACATATTGCACTTTACCACTTTTATCTTCTTTCAAAGCTAAAG
CAAAGAACGCACCTTCGATTTCTTTAGATCCCTCGCCAAAGTAACCAGCA
AGGTCAGAAATAGCTCCACCTTTGTAGTCTTTTCCGTTAAGACCTGTAGT
TCCTGGGAAGTTACTTTTGTTAAGATTTGATTCGGTTTGCAAAATCTTGT
GCAAAGTCACTGTATTAGTTGTTGCTTCATCCGCAAACGCTGGTGCAACT
GAGAGCAATGACGTTAAAGTCAGTAACAATGCCGAGAACATTGCAAAATA
TTTGTTGATTCTTTTCAT

SEQ ID NO: 126

MKRINKYFAMFSALLLTLTSLLSVAPAFADEATTNTVTLHKILQTESNLN
KSNFPGTTGLNGKDYKGGAISDLAGYFGEGSKEIEGAFFALALKEDKSGK
VQYVKAKEGNKLTPALINKDGTPEITVNIDEAVSGLTPEGDTGLVFNTKG
LKGEFKIVEVKSKSTYNNNGSLLAASKAVPVNITLPLVNEDGVVADAHVY
PKNTEEKPEIDKNFAKTNDLTALTDVNRLLTAGANYGNYARDKATATAEI
GKVVPYEVKTKIHKGSKYENLVWTDIMSNGLTMGSTVSLKASGTTETFAK
DTDYELSIDARGFTLKFTADGLGKLEKAAKTADIEFTLTYSATVNGQAII
DNPESNDIKLSYGNKPGKDLTELPVTPSKGEVTVAKTWSDGIAPDGVNVV
YTLKDKDKTVASVSLTKTSKGTIDLGNGIKFEVSGNFSGKFTGLENKSYM
ISERVSGYGSAINLENGKVTITNTKDSDNPTPLNPTEPKVETHGKKFVKT
NEQGDRLAGAQFVVKNSAGKYLALKADQSEGQKTLAAKKIALDEAIAAYN
KLSATDQKGEKGITAKELIKTKQADYDAAFIEARTAYEWITDKARAITYT
SNDQGQFEVTGLADGTYNLEETLAPAGFAKLAGNIKFVVNQGSYITGGNI
DYVANSNQKDATRVENKKVTIPQTGGIGTILFTIIGLSIMLGAVVIMKRR
QSKEA

[0955] Nucleotide and amino acid sequences of GBS 59 sequenced from serotype V isolated strain CJB111 are set forth below as SEQ ID NOS: 127 and 128. The GBS 59 polypeptide of SEQ ID NO:128 is referred to as BO1575.

SEQ ID NO: 127

ATGAAAAAAATCAACAAATGTCTTACAATGTTCTCGACACTGCTATTGAT
CTTAACGTCACTATTCTCAGTTGCACCAGCGTTTGCGGACGACGCAACAA
CTGATACTGTGACCTTGCACAAGATTGTCATGCCACAAGCTGCATTTGAT
AACTTTACTGAAGGTACAAAAGGTAAGAATGATAGCGATTATGTTGGTAA
ACAAATTAATGACCTTAAATCTTATTTTGGCTCAACCGATGCTAAAGAAA
TCAAGGGTGCTTTCTTTGTTTTCAAAAATGAAACTGGTACAAAATTCATT
ACTGAAAATGGTAAGGAAGTCGATACTTTGGAAGCTAAAGATGCTGAAGG
TGGTGCTGTTCTTTCAGGGTTAACAAAAGACAATGGTTTTGTTTTTAACA
CTGCTAAGTTAAAAGGAATTTACCAAATCGTTGAATTGAAAGAAAAATCA
AACTACGATAACAACGGTTCTATCTTGGCTGATTCAAAAGCAGTTCCAGT
TAAAATCACTCTGCCATTGGTAAACAACCAAGGTGTTGTTAAAGATGCTC
ACATTTATCCAAAGAATACTGAAACAAAACCACAAGTAGATAAGAACTTT
GCAGATAAAGATCTTGATTATACTGACAACCGAAAAGACAAAGGTGTTGT
CTCAGCGACAGTTGGTGACAAAAAAGAATACATAGTTGGAACAAAAATTC
TTAAAGGCTCAGACTATAAGAAACTGGTTTGGACTGATAGCATGACTAAA
GGTTTGACGTTCAACAACAACGTTAAAGTAACATTGGATGGTGAAGATTT
TCCTGTTTTAAACTACAAACTCGTAACAGATGACCAAGGTTTCCGTCTTG
CCTTGAATGCAACAGGTCTTGCAGCAGTAGCAGCAGCTGCAAAAGACAAA
GATGTTGAAATCAAGATCACTTACTCAGCTACGGTGAACGGCTCCACTAC
TGTTGAAATTCCAGAAACCAATGATGTTAAATTGGACTATGGTAATAACC
CAACGGAAGAAAGTGAACCACAAGAAGGTACTCCAGCTAACCAAGAAATT
AAAGTCATTAAAGACTGGGCAGTAGATGGTACAATTACTGATGCTAATGT
TGCAGTTAAAGCTATCTTTACCTTGCAAGAAAAACAAACGGATGGTACAT
GGGTGAACGTTGCTTCACACGAAGCAACAAAACCATCACGCTTTGAACAT
ACTTTCACAGGTTTGGATAATGCTAAAACTTACCGCGTTGTCGAACGTGT
TAGCGGCTACACTCCAGAATACGTATCATTTAAAAATGGTGTTGTGACTA
TCAAGAACAACAAAAACTCAAATGATCCAACTCCAATCAACCCATCAGAA
CCAAAAGTGGTGACTTATGGACGTAAATTTGTGAAAACAAATCAAGCTAA
CACTGAACGCTTGGCAGGAGCTACCTTCCTCGTTAAGAAAGAAGGCAAAT
ACTTGGCACGTAAAGCAGGTGCAGCAACTGCTGAAGCAAAGGCAGCTGTA
AAAACTGCTAAACTAGCATTGGATGAAGCTGTTAAAGCTTATAACGACTT
GACTAAAGAAAAACAAGAAGGCCAAGAAGGTAAAACAGCATTGGCTACTG
TTGATCAAAAACAAAAAGCTTACAATGACGCTTTTGTTAAAGCTAACTAC
TCATATGAATGGGTTGCAGATAAAAAGGCTGATAATGTTGTTAAATTGAT
CTCTAACGCCGGTGGTCAATTTGAAATTACTGGTTTGGATAAAGGCACTT
ATGGCTTGGAAGAAACTCAAGCACCAGCAGGTTATGCGACATTGTCAGGT
GATGTAAACTTTGAAGTAACTGCCACATCATATAGCAAAGGGGCTACAAC
TGACATCGCATATGATAAAGGCTCTGTAAAAAAAGATGCCCAACAAGTTC
AAAACAAAAAAGTAACCATCCCACAAACAGGTGGTATTGGTACAATTCTT
TTCACAATTATTGGTTTAAGCATTATGCTTGGAGCAGTAGTTATCATGAA
AAAACGTCAATCAGAGGAAGCTTAA

SEQ ID NO: 128

MKKINKCLTMFSTLLLILTSLFSVAPAFADDATTDTVTLHKIVMPQAAFD
NFTEGTKGKNDSDYVGKQINDLKSYFGSTDAKEIKGAFFVFKNETGTKFI
TENGKEVDTLEAKDAEGGAVLSGLTKDNGFVFNTAKLKGIYQIVELKEKS
NYDNNGSILADSKAVPVKITLPLVNNQGVVKDAHIYPKNTETKPQVDKNF
ADKDLDYTDNRKDKGVVSATVGDKKEYIVGTKILKGSDYKKLVWTDSMTK
GLTFNNNVKVTLDGEDFPVLNYKLVTDDQGFRLALNATGLAAVAAAAKDK
DVEIKITYSATVNGSTTVEIPETNDVKLDYGNNPTEESEPQEGTPANQEI
KVIKDWAVDGTITDANVAVKAIFTLQEKQTDGTWVNVASHEATKPSRFEH
TFTGLDNAKTYRVVERVSGYTPEYVSFKNGVVTIKNNKNSNDPTPINPSE
PKVVTYGRKFVKTNQANTERLAGATFLVKKEGKYLARKAGAATAEAKAAV
KTAKLALDEAVKAYNDLTKEKQEGQEGKTALATVDQKQKAYNDAFVKANY
SYEWVADKKADNVVKLISNAGGQFEITGLDKGTYGLEETQAPAGYATLSG
DVNFEVTATSYSKGATTDIAYDKGSVKKDAQQVQNKKVTIPQTGGIGTIL
FTIIGLSIMLGAVVIMKKRQSEEA

[0956] The GBS 59 polypeptides contain an amino acid motif indicative of a cell wall anchor: SEQ ID NO:129 IPQTG (shown in italics in SEQ ID NOS: 126 and 128 above). In some recombinant host cell systems, it may be preferable to remove this motif to facilitate secretion of a recombinant GBS 59 protein from the host cell. Alternatively, in some recombinant host cell systems, it may be preferable to use the cell wall anchor motif to anchor the recombinantly expressed protein to the cell wall. The extracellular domain of the expressed protein may be cleaved during purification or the recombinant protein may be left attached to either inactivated host cells or cell membranes in the final composition.

[0957] Pilin motifs, containing conserved lysine (K) residues have been identified in the GBS 59 polypeptides. The pilin motif sequences are underlined in each of SEQ ID NOS: 126 and 128, below. Conserved lysine (K) residues are marked in bold. The conserved lysine (K) residues are located at amino acid residues 202 and 212 and amino acid residues 489 and 495 of SEQ ID NO:126 and at amino acid residues 188 and 198 of SEQ ID NO:128. The pilin sequences, in particular the conserved lysine residues, are thought to be important for the formation of oligomeric, pilus-like structures of GBS 59. Preferred fragments of GBS 59 include at least one conserved lysine residue. Preferably, fragments include at least one pilin sequence.

SEQ ID NO: 126

MKRINKYFAMFSALLLTLTSLLSVAPAFADEATTNTVTLHKILQTESNLN
KSNFPGTTGLNGKDYKGGAISDLAGYFGEGSKEIEGAFFALALKEDKSGK
VQYVKAKEGNKLTPALINKDGTPEITVNIDEAVSGLTPEGDTGLVFNTKG
LKGEFKIVEVKSKSTYNNNGSLLAASKAVPVNITLPLVNEDGVVADAHVY
PKNTEEKPEIDKNFAKTNDLTALTDVNRLLTAGANYGNYARDKATATAEI
GKVVPYEVKTKIHKGSKYENLVWTDIMSNGLTMGSTVSLKASGTTETFAK
DTDYELSIDARGFTLKFTADGLGKLEKAAKTADIEFTLTYSATVNGQAII
DNPESNDIKLSYGNKPGKDLTELPVTPSKGEVTVAKTWSDGIAPDGVNVV
YTLKDKDKTVASVSLTKTSKGTIDLGNGIKFEVSGNFSGKFTGLENKSYM
ISERVSGYGSAINLENGKVTITNTKDSDNPTPLNPTEPKVETHGKKFVKT
NEQGDRLAGAQFVVKNSAGKYLALKADQSEGQKTLAAKKIALDEAIAAYN
KLSATDQKGEKGITAKELIKTKQADYDAAFIEARTAYEWITDKARAITYT
SNDQGQFEVTGLADGTYNLEETLAPAGFAKLAGNIKFVVNQGSYITGGNI
DYVANSNQKDATRVENKKVTIPQTGGIGTILFTIIGLSIMLGAVVIMKRR
QSKEA

SEQ ID NO: 128

MKKINKCLTMFSTLLLILTSLFSVAPAFADDATTDTVTLHKIVMPQAAFD
NFTEGTKGKNDSDYVGKQINDLKSYFGSTDAKEIKGAFFVFKNETGTKFI
TENGKEVDTLEAKDAEGGAVLSGLTKDNGFVFNTAKLKGIYQIVELKEKS
NYDNNGSILADSKAVPVKITLPLVNNQGVVKDAHIYPKNTETKPQVDKNF
ADKDLDYTDNRKDKGVVSATVGDKKEYIVGTKILKGSDYKKLVWTDSMTK
GLTFNNNVKVTLDGEDFPVLNYKLVTDDQGFRLALNATGLAAVAAAAKDK
DVEIKITYSATVNGSTTVEIPETNDVKLDYGNNPTEESEPQEGTPANQEI
KVIKDWAVDGTITDANVAVKAIFTLQEKQTDGTWVNVASHEATKPSRFEH
TFTGLDNAKTYRVVERVSGYTPEYVSFKNGVVTIKNNKNSNDPTPINPSE
PKVVTYGRKFVKTNQANTERLAGATFLVKKEGKYLARKAGAATAEAKAAV
KTAKLALDEAVKAYNDLTKEKQEGQEGKTALATVDQKQKAYNDAFVKANY
SYEWVADKKADNVVKLISNAGGQFEITGLDKGTYGLEETQAPAGYATLSG
DVNFEVTATSYSKGATTDIAYDKGSVKKDAQQVQNKKVTIPQTGGIGTIL
FTIIGLSIMLGAVVIMKKRQSEEA

[0958] An E box containing a conserved glutamic residue has also been identified in each of the GBS 59 polypeptides. The E box motif is underlined in each of SEQ ID NOS: 126 and 128 below. The conserved glutamic acid (E) is marked in bold at amino acid residue 621 in SEQ ID NO:126 and at amino acid residue 588 in SEQ ID NO:128. The E box motif, in particular the conserved glutamic acid residue, is thought to be important for the formation of oligomeric pilus-like structures of GBS 59. Preferred fragments of GBS 59 include the conserved glutamic acid residue. Preferably, fragments include the E box motif.

SEQ ID NO: 126

MKRINKYFAMFSALLLTLTSLLSVAPAFADEATTNTVTLHKILQTESNLN
KSNFPGTTGLNGKDYKGGAISDLAGYFGEGSKEIEGAFFALALKEDKSGK
VQYVKAKEGNKLTPALINKDGTPEITVNIDEAVSGLTPEGDTGLVFNTKG
LKGEFKIVEVKSKSTYNNNGSLLAASKAVPVNITLPLVNEDGVVADAHVY
PKNTEEKPEIDKNFAKTNDLTALTDVNRLLTAGANYGNYARDKATATAEI
GKVVPYEVKTKIHKGSKYENLVWTDIMSNGLTMGSTVSLKASGTTETFAK
DTDYELSIDARGFTLKFTADGLGKLEKAAKTADIEFTLTYSATVNGQAII
DNPESNDIKLSYGNKPGKDLTELPVTPSKGEVTVAKTWSDGIAPDGVNVV
YTLKDKDKTVASVSLTKTSKGTIDLGNGIKFEVSGNFSGKFTGLENKSYM
ISERVSGYGSAINLENGKVTITNTKDSDNPTPLNPTEPKVETHGKKFVKT
NEQGDRLAGAQFVVKNSAGKYLALKADQSEGQKTLAAKKIALDEAIAAYN
KLSATDQKGEKGITAKELIKTKQADYDAAFIEARTAYEWITDKARAITYT
SNDQGQFEVTGLADGTYNLEETLAPAGFAKLAGNIKFVVNQGSYITGGNI
DYVANSNQKDATRVENKKVTIPQTGGIGTILFTIIGLSIMLGAVVVIMKR
RQSKEA

SEQ ID NO: 128

MKKINKCLTMFSTLLLILTSLFSVAPAFADDATTDTVTLHKIVMPQAAFD
NFTEGTKGKNDSDYVGKQINDLKSYFGSTDAKEIKGAFFVFKNETGTKFI
TENGKEVDTLEAKDAEGGAVLSGLTKDNGFVFNTAKLKGIYQIVELKEKS
NYDNKGSILADSKAVPVKITLPLVNNQGVVKDAHIYPKNTETKPQVDKNF
ADKDLDYTDNRKDKGVVSATVGDKKEYIVGTKILKGSDYKKLVWTDSMTK
GLTFNNNVKVTLDGEDFPVLNYKLVTDDQGFRLALNATGLAAVAAAAKDK
DVEIKITYSATVNGSTTVEIPETNDVKLDYGNNPTEESEPQEGTPANQEI
KVIKDWAVDGTITDANVAVKAIFTLQEKQTDGTWVNVASHEATKPSRFEH
TFTGLDNAKTYRVVERVSGYTPEYVSFKNGVVTIKNNKNSNDPTPINPSE
PKVVTYGRKFVKTNQANTERLAGATFLVKKEGKYLARKAGAATAEAKAAV
KTAKLALDEAVKAYNDLTKEKQEGQEGKTALATVDQKQKAYNDAFVKANY
SYEWVADKKADNVVKLISNAGGQFEITGLDKGTYGLEETQAPAGYATLSG
DVNFEVTATSYSKGATTDIAYDKGSVKKDAQQVQNKKVTIPQTGGIGTIL
FTIIGLSIMLGAVVIMKKRQSEEA

[0959] Female mice were immunized with either SAG1407 (SEQ ID NO:126) or B01575 (SEQ ID NO:128) in an active maternal immunization assay. Pups bred from the immunized female mice survived GBS challenge better than control (PBS) treated mice. Results of the active maternal immunization assay using the GBS 59 immunogenic compositions are shown in Table 17, below.

TABLE 17
Active maternal immunization assay for GBS 59

| Challenge | GBS 59 | | PBS | | |
|---|---|---|---|---|---|
| GBS strain | Dead/ | Survival | Dead/ | Survival | |
| (serotype) | treated | (%) | treated | (%) | FACS |
| CJB111 (V)* | 7/20 | 65 | 41/49 | 16 | 493 |
| 18RS21 (II)** | 18/30 | 40 | 39/40 | 2.5 | 380 |

*immunized with BO1575
**immunized with SAG1407

[0960] Opsonophagocytosis assays also demonstrated that antibodies against B01575 are opsonic for GBS serotype V, strain CJB111. See FIG. 67.

### GBS 52

[0961] Examples of polynucleotide and amino acid sequences for GBS 52 are set forth below. SEQ ID NO:20 and 21 represent GBS 52 sequences from GBS serotype V, strain isolate 2603.

SEQ ID NO: 20

ATGAAACAAACATTAAAACTTATGTTTTCTTTTCTGTTGATGTTAGGGAC
TATGTTTGGAATTAGCCAAACTGTTTTAGCGCAAGAAACTCATCAGTTGA
CGATTGTTCATCTTGAAGCAAGGGATATTGATCGTCCAAATCCACAGTTG
GAGATTGCCCCTAAAGAAGGGACTCCAATTGAAGGAGTACTCTATCAGTT
GTACCAATTAAAATCAACTGAAGATGGCGATTTGTTGGCACATTGGAATT
CCCTAACTATCACAGAATTGAAAAAACAGGCGCAGCAGGTTTTTGAAGCC
ACTACTAATCAACAAGGAAAGGCTACATTTAACCAACTACCAGATGGAAT
TTATTATGGTCTGGCGGTTAAAGCCGGTGAAAAAAATCGTAATGTCTCAG
CTTTCTTGGTTGACTTGTCTGAGGATAAAGTGATTTATCCTAAAATCATC
TGGTCCACAGGTGAGTTGGACTTGCTTAAAGTTGGTGTGGATGGTGATAC
CAAAAAACCACTAGCAGGCGTTGTCTTTGAACTTTATGAAAAGAATGGTA
GGACTCCTATTCGTGTGAAAAATGGGGTGCATTCTCAAGATATTGACGCT
GCAAAACATTTAGAAACAGATTCATCAGGGCATATCAGAATTTCCGGGCT
CATCCATGGGGACTATGTCTTAAAAGAAATCGAGACACAGTCAGGATATC
AGATCGGACAGGCAGAGACTGCTGTGACTATTGAAAAATCAAAAACAGTA
ACAGTAACGATTGAAAATAAAAAAGTTCCGACACCTAAAGTGCCATCTCG
AGGAGGTCTTATTCCCAAAACAGGTGAGCAACAGGCAATGGCACTTGTAA
TTATTGGTGGTATTTTAATTGCTTTAGCCTTACGATTACTATCAAAACAT
CGGAAACATCAAAATAAGGAT

SEQ ID NO: 21

MKQTLKLMFSFLLMLGTMFGTSQTVLAQETHQLTIVHLEARDIDRPNPQL
EIAPKEGTPIEGVLYQLYQLKSTEDGDLLAHWNSLTITELKKQAQQVFEA
TTNQQGKATFNQLPDGIYYGLAVKAGEKNRNVSAFLVDLSEDKVIYPKII
WSTGELDLLKVGVDGDTKKPLAGVVFELYEKNGRTPIRVKNGVHSQDIDA
AKHLETDSSGHIRISGLIHGDYVLKEIETQSGYQIGQAETAVTIEKSKTV
TVTIENKKVPTPKVPSRGGLIPKTGEQQAMALVIIGGILIALALRLLSKH
RKHQNKD

[0962] GBS 52 contains an amino acid motif indicative of a cell wall anchor: SEQ ID NO:124 IPKTG (shown in italics in SEQ ID NO:21, above). In some recombinant host cell systems, it may be preferable to remove this motif to facilitate secretion of a recombinant GBS 52 protein from the host cell. Alternatively, in other recombinant host cell systems, it may be preferable to use the cell wall anchor motif to anchor the recombinantly expressed protein to the cell wall. The extracellular domain of the expressed protein may be cleaved during purification or the recombinant protein may be left attached to either inactivated host cells or cell membranes in the final composition.

[0963] A pilin motif, discussed above, containing a conserved lysine (K) residue has also been identified in GBS 52. The pilin motif sequence is underlined in SEQ ID NO:21, below. Conserved lysine (K) residues are also marked in bold, at amino acid residues 148 and 160. The pilin sequence, in particular the conserved lysine residues, are thought to be important for the formation of oligomeric, pilus-like structures. Preferred fragments of GBS 52 include at least one conserved lysine residue. Preferably, fragments include the pilin sequence.

SEQ ID NO: 21

MKQTLKLMFSFLLMLGTMFGISQTVLAQETHQLTIVHLEARDIDRPNPQL
EIAPKEGTPIEGVLYQLYQLKSTEDGDLLAHWNSLTITELKKQAQQVFEA
TTNQQGKATFNQLPDGIYYGLAVKAGEKNRNVSAFLVDLSEDKVIYPKII
WSTGELDLLKVGVDGDTKKPLAGVVFELYEKNGRTPIRVKNGVHSQDIDA
AKHLETDSSGHIRISGLIHGDYVLKEIETQSGYQIGQAETAVTIEKSKTV
TVTIENKKVPTPKVPSRGGLIPKTGEQQAMALVIIGGILIALALRLLSKH
RKHQNKD

[0964] An E box containing a conserved glutamic residue has been identified in GBS 52. The E-box motif is underlined in SEQ ID NO:21, below. The conserved glutamic acid (E), at amino acid residue 226, is marked in bold. The E box motif, in particular the conserved glutamic acid residue, is thought to be important for the formation of oligomeric pilus-like structures of GBS 52. Preferred fragments of GBS 52 include the conserved glutamic acid residue. Preferably, fragments include the E box motif.

SEQ ID NO: 21

MKQTLKLMFSFLLMLGTMFGISQTVLAQETHQLTIVHLEARDIDRPNPQL
EIAPKEGTPIEGVLYQLYQLKSTEDGDLLAHWNSLTITELKKQAQQVFEA
TTNQQGKATFNQLPDGIYYGLAVKAGEKNRNVSAFLVDLSEDKVIYPKII
WSTGELDLLKVGVDGDTKKPLAGVVFELYEKNGRTPIRVKNGVHSQDIDA
AKHLETDSSGHIRISGLIHGDYVLKEIETQSGYQIGQAETAVTIEKSKTV
TVTIENKKVPTPKVPSRGGLIPKTGEQQAMALVIIGGILIALALRLLSKH
RKHQNKD

### SAG0647

[0965] Examples of polynucleotide and amino acid sequences for SAG0647 are set forth below. SEQ ID NO:22 and 23 represent SAG0647 sequences from GBS serotype V, strain isolate 2603.

SEQ ID NO: 22

ATGGGACAAAAATCAAAAATATCTCTAGCTACGAATATTCGTATATGGAT
TTTTCGTTTAATTTTCTTAGCGGGTTTCCTTGTTTTGGCATTTCCCATCG
TTAGTCAGGTCATGTACTTTCAAGCCTCTCACGCCAATATTAATGCTTTT
AAAGAAGCTGTTACCAAGATTGACCGGGTGGAGATTAATCGGCGTTTAGA
ACTTGCTTATGCTTATAACGCCAGTATAGCAGGTGCCAAAACTAATGGCG
AATATCCAGCGCTTAAAGACCCCTACTCTGCTGAACAAAAGCAGGCAGGG
GTCGTTGAGTACGCCCGCATGCTTGAAGTCAAAGAACAAATAGGTCATGT
GATTATTCCAAGAATTAATCAGGATATCCCTATTTACGCTGGCTCTGCTG
AAGAAAATCTTCAGAGGGGCGTTGGACATTTAGAGGGGACCAGTCTTCCA
GTCGGTGGTGAGTCAACTCATGCCGTTCTAACTGCCCATCGAGGGCTACC
AACGGCCAAGCTATTTACCAATTTAGACAAGGTAACAGTAGGTGACCGTT
TTTACATTGAACACATCGGCGGAAAGATTGCTTATCAGGTAGACCAAATC
AAAGTTATCGCCCCTGATCAGTTAGAGGATTTGTACGTGATTCAAGGAGA
AGATCACGTCACCCTATTAACTTGCACACCTTATATGATAAATAGTCATC
GCCTCCTCGTTCGAGGCAAGCGAATTCCTTATGTGGAAAAAACAGTGCAG
AAAGATTCAAAGACCTTCAGGCAACAACAATACCTAACCTATGCTATGTG
GGTAGTCGTTGGACTTATCTTGCTGTCGCTTCTCATTTGGTTTAAAAAGA
CGAAACAGAAAAAGCGGAGAAAGAATGAAAAAGCGGCTAGTCAAAATAGT
CACAATAATTCGAAATAA

SEQ ID NO: 23

MGQKSKISLATNIRIWIFRLIFLAGFLVLAFPIVSQVMYFQASHANINAF
KEAVTKIDRVEINRRLELAYAYNASIAGAKTNGEYPALKDPYSAEQKQAG
VVEYARMLEVKEQIGHVIIPRINQDIPIYAGSAEENLQRGVGHLEGTSLP
VGGESTHAVLTAHRGLPTAKLFTNLDKVTVGDRFYIEHIGGKIAYQVDQI
KVIAPDQLEDLYVIQGEDHVTLLTCTPYMINSHRLLVRGKRIPYVEKTVQ
KDSKTFRQQQYLTYANWVVVGLILLSLLIWFKKTKQKKRRKNEKAASQNS
HNNSK

### SAG0648

[0966] Examples of polynucleotide and amino acid sequences for SAG0648 are set forth below. SEQ ID NO:24 and 25 represent SAG0648 sequences from GBS serotype V, strain isolate 2603.

SEQ ID NO: 24

ATGGGAAGTCTGATTCTCTTATTTCCGATTGTGAGCCAGGTAAGTTACTA
CCTTGCTTCGCATCAAAATATTAATCAATTTAAGCGGGAAGTCGCTAAGA
TTGATACTAATACGGTTGAACGACGCATCGCTTTAGCTAATGCTTACAAT
GAGACGTTATCAAGGAATCCCTTGCTTATAGACCCTTTTACCAGTAAGCA
AAAAGAAGGTTTGAGAGAGTATGCTCGTATGCTTGAAGTTCATGAGCAAA
TAGGTCATGTGGCAATCCCAAGTATTGGGGTTGATATTCCAATTTATGCT
GGAACATCCGAAACTGTGCTTCAGAAAGGTAGTGGGCATTTGGAGGGAAC
CAGTCTTCCAGTGGGAGGTTTGTCAACCCATTCAGTACTAACTGCCCACC
GTGGCTTGCCAACAGCTAGGCTATTTACCGACTTAAATAAAGTTAAAAAA
GGCCAGATTTTCTATGTGACGAACATCAAGGAAACACTTGCCTACAAAGT
CGTGTCTATCAAAGTTGTGGATCCAACAGCTTTAAGTGAGGTTAAGATTG
TCAATGGTAAGGATTATATAACCTTGCTGACTTGCACACCTTACATGATC
AATAGTCATCGTCTCTTGGTAAAAGGAGAGCGTATTCCTTATGATTCTAC
CGAGGCGGAAAAGCACAAAGAACAAACCGTACAAGATTATCGTTTGTCAC
TAGTGTTGAAGATACTACTAGTATTATTAATTGGACTCTTCATCGTGATA
ATGATGAGAAGATGGATGCAACATCGTCAATAA

SEQ ID NO: 25

MGSLILLFPIVSQVSYYLASHQNINQFKREVAKIDTNTVERRIALANAYN
ETLSRNPLLIDPFTSKQKEGLREYARMLEVHEQIGHVAIPSIGVDIPIYA
GTSETVLQKGSGHLEGTSLPVGGLSTHSVLTAHRGLPTARLFTDLNKVKK
GQIFYVTNIKETLAYKVVSIKVVDPTALSEVKIVNGKDYITLLTCTPYMT
NSHRLLVKGERIPYDSTEAEKHKEQTVQDYRLSLVLKILLVLLIGLFIVI
MMRRWMQHRQ

### GBS 150

[0967] Examples of polynucleotide and amino acid sequences for GBS 150 are set forth below. SEQ ID NO:26 and 27 represent GBS 150 sequences from GBS serotype V, strain isolate 2603.

SEQ ID NO: 26

ATGAAAAAGATTAGAAAAAGTTTAGGACTTCTACTATGTTGCTTTTTAGG
ATTGGTACAATTAGCGTTTTTTTCGGTAGCCAGTGTAAATGCTGATACCC
CTAATCAACTAACAATCACACAGATAGGACTTCAGCCAAATACTACAGAG
GAGGGGATTTCTTATCGTTTATGGACTGTGACTGACAACTTAAAAGTTGA
TTTATTGAGCCAAATGACAGATAGCGAATTGAACCAGAAGTATAAGAGTA
TCTTGACTTCTCCTACTGATACTAATGGTCAGACAAAGATAGCACTCCCA
AATGGTTCGTACTTTGGTCGTGCTTATAAAGCTGATCAAAGCGTTTCAAC
AATAGTACCTTTTTATATTGAATTACCAGATGATAAGTTATCAAATCAAT
TACAGATAAATCCTAAGCGAAAAGTTGAAACAGGCCGATTAAAACTTATT
AAATATACAAAAGAAGGAAAGATAAAGAAAAGGCTATCCGGAGTAATATT
TGTATTATACGATAACCAGAATCAGCCAGTTCGCTTTAAAAATGGACGAT
TTACGACCGATCAAGATGGGATTACTTCATTAGTAACTGATGATAAGGGA
GAAATTGAGGTTGAAGGTTTATTACCTGGTAAGTATATTTTTCGAGAAGC
AAAAGCACTAACTGGTTACCGTATATCTATGAAGGATGCTGTAGTTGCTG
TAGTTGCTAATAAAACACAGGAAGTAGAGGTAGAAAACGAAAAAGAAACT
CCTCCACCAACAAATCCTAAACCATCACAACCGCTTTTTCCACAATCATT
TCTTCCTAAAACAGGAATGATTATTGGTGGAGGACTGACAATTCTTGGTT
GTATTATTTTGGGAATTTTGTTTATCTTTTTAAGAAAAACTAAAAATAGC
AAATCTGAAAGAAACGATACAGTA

SEQ ID NO: 27

MKKIRKSLGLLLCCFLGLVQLAFFSVASVNADTPNQLTITQIGLQPNTTE
EGISYRLWTVTDNLKVDLLSQMTDSELNQKYKSILTSPTDTNGQTKIALP
NGSYFGRAYKADQSVSTIVPFYIELPDDKLSNQLQINPKRKVETGRLKLI
KYTKEGKIKKRLSGVIFVLYDNQNQPVRFKNGRFTTDQDGITSLVTDDKG
EIEVEGLLPGKYIFREAKALTGYRISMKDAVVAVVANKTQEVEVENEKET
PPPTNPKPSQPLFPQSFLPKTGMIIGGGLTILGCIILGILFIFLRKTKNS
KSERNDTV

[0968] GBS 150 contains an amino acid motif indicative of a cell wall anchor: SEQ ID NO:130 LPKTG (shown in italics in SEQ ID NO:27 above). In some recombinant host cell systems, it may be preferable to remove this motif to facilitate secretion of a recombinant GBS 150 protein from the host cell. Alternatively, in other recombinant host cell systems, it may be preferable to use the cell wall anchor motif to anchor the recombinantly expressed protein to the cell wall. The extracellular domain of the expressed protein may be cleaved during purification or the recombinant protein may be left attached to either inactivated host cells or cell membranes in the final composition.

[0969] As discussed above, a pilin motif, containing a conserved lysine (K) residue has been identified in GBS 150. The pilin motif sequence is underlined in SEQ ID NO:27, below. Conserved lysine (K) residues are marked in bold, at amino acid residues 139 and 148. The pilin sequence, in particular the conserved lysine residues, are thought to be important for the formation of oligomeric, pilus-like structures of GBS 150. Preferred fragments of GBS 150 include a conserved lysine residue. Preferably, fragments include the pilin sequence.

SEQ ID NO: 27

MKKIRKSLGLLLCCFLGLVQLAFFSVASVNADTPNQLTITQIGLQPNTTE
EGISYRLWTVTDNLKVDLLSQMTDSELNQKYKSILTSPTDTNGQTKIALP
NGSYFGRAYKADQSVSTIVPFYIELPDDKLSNQLQINPKRKVETGRLKLI
KYTKEGKIKKRLSGVIFVLYDNQNQPVRFKNGRFTTDQDGITSLVTDDKG
EIEVEGLLPGKYIFREAKALTGYRISMKDAVVAVVANKTQEVEVENEKET
PPPTNPKPSQPLFPQSFLPKTGMIIGGGLTILGCIILGILFIFLRKTKNS
KSERNDTV

[0970] An E box containing a conserved glutamic residue has also been identified in GBS 150. The E box motif is underlined in SEQ ID NO:27 below. The conserved glutamic acid (E), at amino acid residue 216, is marked in bold. The E box motif, in particular the conserved glutamic acid residue, is thought to be important for the formation of oligomeric pilus-like structures of GBS 150. Preferred fragments of GBS 150 include the conserved glutamic acid residue. Preferably, fragments include the E box motif.

SEQ ID NO: 27

MKKIRKSLGLLLCCFLGLVQLAFFSVASVNADTPNQLTITQIGLQPNTTE
EGISYRLWTVTDNLKVDLLSQMTDSELNQKYKSILTSPTDTNGQTKIALP
NGSYFGRAYKADQSVSTIVPFYIELPDDKLSNQLQINPKRKVETGRLKLI
KYTKEGKIKKRLSGVIFVLYDNQNQPVRFKNGRFTTDQDGITSLVTDDKG
EIEVEGLLPGKYIFREAKALTGYRISMKDAVVAVVANKTQEVEVENEKET
PPPTNPKPSQPLFPQSFLPKTGMIIGGGLTILGCIILGILFIFLRKTKNS
KSERNDTV

### SAG 1405

[0971] Examples of polynucleotide and amino acid sequences for SAG1405 are set forth below. SEQ ID NO:28 and 29 represent SAG1405 sequences from GBS serotype V, strain isolate 2603.

SEQ ID NO: 28

ATGGGAGGAAAATTTCAGAAAAACCTTAAGAAATCGGTCGTTTTAAATCG
ATGGATGAATGTAGGCTTGATACTATTGTTCTTAGTTGGTCTTTTGATAA
CCTCATATCCTTTTATTTCAAATTGGTACTATAATATTAAAGCTAATAAT
CAAGTAACTAACTTTGATAATCAAACCCAAAAATTAAATACTAAAGAGAT
TAATAGACGATTTGAGTTAGCAAAAGCTTATAATAGAACACTGGACCCAA
GCCGCCTATCAGATCCCTATACTGAAAAAGAAAAAAAAGGTATTGCTGAA
TACGCCCACATGCTTGAGATTGCTGAAATGATTGGATATATTGATATACC
GTCTATCAAGCAAAAATTACCTATCTATGCGGGGACTACCAGTAGTGTTC
TTGAAAAAGGAGCAGGACACCTTGAAGGAACCTCCTTGCCAATTGGTGGA
AAAAGTTCACATACTGTTATCACAGCTCATCGCGGCTTACCTAAAGCTAA
GTTATTTACAGATTTAGATAAACTTAAAAAAGGAAAAATTTTTTATATTC
ATAATATCAAAGAAGTTTTAGCCTATAAGGTTGATCAAATAAGTGTTGTA
AAGCCAGATAATTTTTCTAAATTATTGGTTGTTAAAGGTAAGGATTATGC
GACTTTGCTAACATGTACACCTTATTCGATTAATTCACATCGTTTACTAG
TTAGAGGGCATCGAATCAAGTATGTACCTCCTGTTAAAGAAAAGAACTAT
TTAATGAAAGAATTGCAAACACACTATAAACTTTATTTCCTCTTATCAAT
CCTAGTTATTCTTATATTAGTCGCTTTACTATTATATTTAAAACGAAAAT
TTAAAGAGAGAAAGAGAAAGGGAAATCAAAAATGA

SEQ ID NO: 29

MGGKFQKNLKKSVVLNRWMNVGLILLFLVGLLITSYPFISNWYYNTKANN
QVTNFDNQTQKLNTKEINRRFELAKAYNRTLDPSRLSDPYTEKEKKGIAE
YAHMLEIAEMIGYIDIPSIKQKLPIYAGTTSSVLEKGAGHLEGTSLPIGG
KSSHTVITAHRGLPKAKLFTDLDKLKKGKTFYTHNTKEVLAYKVDQISVV
KPDNFSKLLVVKGKDYATLLTCTPYSINSHRLLVRGHRIKYVPPVKEKNY
LMKELQTHYKLYFLLSILVILILVALLLYLKRKFKERKRKGNQK

### SAG1406

[0972] Examples of polynucleotide and amino acid sequences for SAG1405 are set forth below. SEQ ID NO:30 and 31 represent SAG1405 sequences from GBS serotype V, strain isolate 2603.

SEQ ID NO: 30

GTGAAGACTAAAAAAATCATCAAAAAAACAAAAAAAAAGAAGAAGTCAAA
TCTTCCTTTTATCATTCTTTTTCTAATAGGTCTATCTATTTTATTGTATC
CAGTGGTATCACGTTTTTACTATACGATAGAATCTAATAATCAAACACAG
GATTTTGAGAGAGCTGCTAAAAACTTAGTCAGAAAGAAATCAATCGACGT
ATGGCTCTAGCACAAGCTTATAATGATTCTTTAAATAATGTCCATCTTGA
AGATCCTTATGAGAAAAAACGAATTCAAAAGGGGGTAGCAGAGTACGCCC
GTATGTTAGAGGTAAGTGAAAAAATCGGAACAATTTCAGTTCCTAAGATA
GGTCAAAAACTCCCTATATTTGCAGGTTCAAGTCAAGAAGTTCTATCTAA
AGGAGCAGGGCATTTAGAAGGTACCTCTCTTCCAATTGGGGGCAATAGTA
CACATACTGTTATAACAGCGCATTCAGGAATTCCAGATAAAGAACTCTTT
TCTAACCTTAAAAAGTTAAAAAAAGGAGATAAGTTTTATATTCAAAACAT
AAAAGAAACGATAGCATATCAAGTAGATCAGATAAAAGTCGTTACACCCG
ATAACTTTTCAGATTTGTTGGTTGTTCCTGGACATGATTATGCAACCTTA
TTGACTTGCACCCCGATTATGATCAATACACACAGACTTTTAGTAAGGGG
ACATCGTATCCCTTATAAAGGTCCTATTGATGAAAAATTAATAAAAGACG
GTCATTTAAACACGATTTATAGATATCTATTCTATATATCTTTAGTTATT
ATTGCTTGGTTACTTTGGTTAATAAAACGTCAACGTCAAAAAAATCGTTT
AGCAAGTGTTAGAAAAGGAATTGAATCATAA

SEQ ID NO: 31

MKTKKIIKKTKKKKKSNLPFIILFLIGLSILLYPVVSRFYYTIESNNQTQ
DFEPAAKKLSQKETNRRMALAQAYNDSLNNVHLEDPYEKKRIQKGVAEYA
RMLEVSEKIGTISVPKIGQKLPIFAGSSQEVLSKGAGHLEGTSLPIGGNS
THTVITAHSGIPDKELFSNLKKLKKGDKFYIQNIKETIAYQVDQIKVVTP
DNFSDLLVVPGHDYATLLTCTPIMINTHRLLVRGHRIPYKGPIDEKLIKD
GHLNTIYRYLFYTSLVIIAWLLWLIKRQRQKNRLASVRKGIES

01520

[0973] An example of an amino acid sequence for 01520 is set forth below. SEQ ID NO:32 represents a 01520 sequence from GBS serotype III, strain isolate COH1.

SEQ ID NO: 32

MIRRYSANFLAILGIILVSSGIYWGWYNINQAHQADLTSQHIVKVLDKSI
THQVKGSENGELPVKKLDKTDYLGTLDIPNLKLHLPVAANYSFEQLSKTP
TRYYGSYLTNNMVICAHNFPYHFDALKNVDMGTDVYFTTTTGQIYHYKIS
NREIIEPTAIEKVYKTATSDNDWDLSLFTCTKAGVARVLVRCQLIDVKN

01521

[0974] An example of an amino acid sequence for 01521 is set forth below. SEQ ID NO:33 represents a 01521 sequence from GBS serotype III, strain isolate COH1.

SEQ ID NO: 33

MIYKKILKITLLLLFSLSTQLVSADTNDQMKTGSITIQNKYNNQGIAGGN
LLVYQVAQAKDVDGNQVFTLTTPFQOIGIKDDDLTQVNLDSNQAKYVNLL
TKAVHKTQPLQTFDNLPAEGIVANNLPQGIYLFIQTKTAQGYELMSPFIL
SIPKDGKYDITAFEKMSPLNAKPKKEETITPTVTHQTKGKLPFTGQVWWP
IPILIMSGLLCLIIALKWRRRRD

[0975] 01521 contains an amino acid motif indicative of a cell wall anchor: SEQ ID NO:132 LPFTG (shown in italics in SEQ ID NO:33 above). In some recombinant host cell systems, it may be preferable to remove this motif to facilitate secretion of a recombinant 01521 protein from the host cell. Alternatively, it may be preferable to use the cell wall anchor motif to anchor the recombinantly expressed protein to the cell wall. The extracellular domain of the expressed protein may be cleaved during purification or the recombinant protein may be left attached to either inactivated host cells or cell membranes in the final composition.

[0976] Two pilin motifs, containing conserved lysine (K) residues have been identified in 01521. The pilin motif sequences are underlined in SEQ ID NO:33, below. Conserved lysine (K) residues are marked in bold, at amino acid residues 154 and 165 and at amino acid residues 174 and 188. The pilin sequences, in particular the conserved lysine residues, are thought to be important for the formation of oligomeric, pilus-like structures of 01521. Preferred fragments of 01521 include at least one conserved lysine residue. Preferably, fragments include at least one pilin sequence.

SEQ ID NO: 33

MIYKKILKITLLLLFSLSTQLVSADTNDQMKTGSITIQNKYNNQGIAGGN
LLVYQVAQAKDVDGNQVFTLTTPFQOIGIKDDDLTQVNLDSNQAKYVNLL
TKAVHKTQPLQTFDNLPAEGIVANNLPQGIYLFIQTKTAQGYELMSPFIL
SIPKDGKYDITAFEKMSPLNAKPKKEETITPTVTHQTKGKLPFTGQVWWP
IPILIMSGLLCLIIALKWRRRRD

[0977] An E box containing a conserved glutamic residue has also been identified in 01521. The E box motif is underlined in SEQ ID NO:33 below. The conserved glutamic acid (E), at amino acid residue 177, is marked in bold. The E box motif, in particular the conserved glutamic acid residue, is thought to be important for the formation of oligomeric pilus-like structures of 01521. Preferred fragments of 01521 include the conserved glutamic acid residue. Preferably, fragments include the E box motif.

SEQ ID NO: 33

MIYKKILKITLLLLFSLSTQLVSADTNDQMKTGSITIQNKYNNQGIAGGN
LLVYQVAQAKDVDGNQVFTLTTPFQOIGIKDDDLTQVNLDSNQAKYVNLL
TKAVHKTQPLQTFDNLPAEGIVANNLPQGIYLFIQTKTAQGYELMSPFIL
SIPKDGKYDITAFEKMSPLNAKPKKEETITPTVTHQTKGKLPFTGQVWWP
IPILIMSGLLCLIIALKWRRRRD

01522

[0978] An example of an amino acid sequence for 01522 is set forth below. SEQ ID NO:34 represents a 01522 sequence from GBS serotype III, strain isolate COH1.

SEQ ID NO: 34

MAYPSLANYWNSFHQSRAIMDYQDRVTHMDENDYKKIINRAKEYNKQFKT
SGMKWHMTSQERLDYNSQLAIDKTGNMGYISIPKINIKLPLYHGTSEKVL
QTSIGHLEGSSLPIGGDSTHSILSGHRGLPSSRLFSDLDKLKVGDHWTVS
ILNETYTYQVDQIRTVKPDDLRDLQIVKGKDYQTLVTCTPYGVNTHRLLV
RGHRVPNDNGNALVVAEAIQIEPIYIAPFIAIFLTLILLLISLEVTRPAR
QRKKILKQAMRKEENNDL

01523

[0979] An example of an amino acid sequence for 01523 is set forth below. SEQ ID NO:35 represents a 01523 sequence from GBS serotype III, strain isolate COH1.

SEQ ID NO: 35

MKKKMIQSLLVASLAFGMAVSPVTPIAFAAETGTITVQDTQKGATYKAYK
VFDAEIDNANVSDSNKDGASYLIPQGKEAEYKASTDFNSLFTTTTNGGRT
YVTKKDTASANEIATWAKSISANTTPVSTVTESNNDGTEVINVSQYGYYY
VSSTVNNGAVIMVTSVTPNATIHEKNTDATWGDGGGKTVDQKTYSVGDTV
KYTITYKNAVNYHGTEKVYQYVIKDTMPSASVVDLNEGSYEVTITDGSGN
ITTLTQGSEKATGKYNLLEENNNFTITIPWAATNTPTGNTQNGANDDFFY
KGINTITVTYTGVLKSGAKPGSADLPENTNIATINPNTSNDDPGQKVTVR
DGQITIKKIDGSTKASLQGAIFVLKNATGQFLNFNDTNNVEWGTEANATE
YTTGADGIITITGLKEGTYYLVEKKAPLGYNLLDNSQKVILGDGATDTTN
SDNLLVNPTVENNKGTELPSTGGIGTTIFYIIGAILVIGAGIVLVARRRL
RS

[0980] 01523 contains an amino acid motif indicative of a cell wall anchor: SEQ ID NO:131 LPSTG (shown in italics in SEQ ID NO:35 above). In some recombinant host cell systems, it may be preferable to remove this motif to facilitate secretion of a recombinant 01523 protein from the host cell. Alternatively, it may be preferable to use the cell wall anchor motif to anchor the recombinantly expressed protein to the cell wall. The extracellular domain of the expressed protein may be cleaved during purification or the recombinant protein may be left attached to either inactivated host cells or cell membranes in the final composition.

[0981] An E box containing a conserved glutamic residue has also been identified in 01523. The E box motif is underlined in SEQ ID NO:35 below. The conserved glutamic acid (E), at amino acid residue 423, is marked in bold. The E box motif, in particular the conserved glutamic acid residue, is thought to be important for the formation of oligomeric pilus-like structures of 01523. Preferred fragments of 01523 include the conserved glutamic acid residue. Preferably, fragments include the E box motif.

SEQ ID NO: 35

MKKKMIQSLLVASLAFGMAVSPVTPIAFAAETGTITVQDTQKGATYKAYK
VFDAEIDNANVSDSNKDGASYLIPQGKEAEYKASTDFNSLFTTTTNGGRT
YVTKKDTASANEIATWAKSISANTTPVSTVTESNNDGTEVINVSQYGYYY
VSSTVNNGAVIMVTSVTPNATIHEKNTDATWGDGGGKTVDQKTYSVGDTV
KYTITYKNAVNYHGTEKVYQYVIKDTMPSASVVDLNEGSYEVTITDGSGN
ITTLTQGSEKATGKYNLLEENNNFTITIPWAATNTPTGNTQNGANDDFFY
KGINTITVTYTGVLKSGAKPGSADLPENTNIATINPNTSNDDPGQKVTVR
DGQITIKKIDGSTKASLQGAIFVLKNATGQFLNFNDTNNVEWGTEANATE
YTTGADGIITITGLKEGTYYLVEKKAPLGYNLLDNSQKVILGDGATDTTN
SDNLLVNPTVENNKGTELPSTGGIGTTIFYIIGAILVIGAGIVLVARRRL
RS

[0982] 01524

[0983] An example of an amino acid sequence for 01524 is set forth below. SEQ ID NO:36 represents a 01524 sequence from GBS serotype III, strain isolate COH1.

SEQ ID NO: 36

MLKKCQTFIIESLKKKKHPKEWKIIMWSLMILTTFLTTYFLILPAITVEE
TKTDDVGITLENKNSSQVTSSTSSSQSSVEQSKPQTPASSVTETSSSEEA
AYREEPLMFRGADYTVTVTLTKEAKIPKNADLKVTELKDNSATFKDYKKK
ALTEVAKQDSEIKNFKLYDITIESNGKEAEPQAPVKVEVNYDKPLEASDE
NLKVVHFKDDGQTEVLKSKDTAETKNTSSDVAFKTDSFSIYAIVQEDNTE
VPRLTYHFQNNDGTDYDFLTASGMQVHHQIIKDGESLGEVGIPTIKAGEH
FNGWYTYDPTTGKYGDPVKFGEPITVTETKEICVRPFMSKVATVTLYDDS
AGKSILERYQVPLDSSGNGTADLSSFKVSPPTSTLLFVGWSKTQNGAPLS
ESETQALPVSSDISLYPVFKESYGVEFNTGDLSTGVTYIAPRRVLTGQPA
STIKPNDPTRPGYTFAGWYTAASGGAAFDFNQVLTKDTTLYAHWSPAQTT
YTINYWQQSATDNKNATDAQKTYEYAGQVTRSGLSLSNQTLTQQDINDKL
PTGFKVNNTRTETSVMIKDDGSSVVNVYYDRKLITIKFAKYGGYSLPEYY
YSYNWSSDADTYTGLYGTTLAANGYQWKTGAWGYLANVGNNQVGTYGMSY
LGEFILPNDTVDSDVIKLFPKGNIVQTYRFFKQGLDGTYSLADTGGGAGA
DEFTFTEKYLGFNVKYYQRLYPDNYLFDQYASQTSAGVKVPISDEYYDRY
GAYHKDYLNLVVWYERNSYKIKYLDPLDNTELPNFPVKDVLYEQNLSSYA
PDTTTVQPKPSRPGYVWDGKWYKDQAQTQVFDFNTTMPPHDVKVYAGWQK
VTYRVNIDPNGGRLSKTDDTYLDLHYGDRIPDYTDITRDYIQDPSGTYYY
KYDSRDKDPDSTKDAYYTTDTSLSNVDTTTKYKYVKDAYKLVGWYYVNPD
GSIRPYNFSGAVTQDTNLRAIWRKAGDYHIIYSNDAVGTDGKPALDASGQ
QLQTSNEPTDPDSYDDGSHSALLRRPTMPDGYRFRGWWYNGKIYNPYDSI
DIDAHLADANKNITIKPVIIPVGDIKLEDTSIKYNGNGGTRVENGNVVTQ
VETPRMELNSTTTIPENQYFTRTGYNLIGWHHDKDLADTGRVEFTAGQSI
GIDNNPDATNTLYAVWQPKEYTVRVSKTVVGLDEDKTKDFLFNPSETLQQ
ENFPLRDGQTKEFKVPYGTSISTDEQAYDEFKVSESITEKNLATGEADKT
YDATGLQSLTVSGDVDISFTNTRIKQKVRLQKVNVENDNNFLAGAVFDIY
ESDANGNKASHPMYSGLVTNDKGLLLVDANNYLSLPVGKYYLTETKAPPG
YLLPKNDISVLVISTGVTFEQNGNNATPIKENLVDGSTVYTFKITNSKGT
ELPSTGGTGTHIYTLVGLALALPSGLILYYRKKI

[0984] 01524 contains an amino acid motif indicative of a cell wall anchor: SEQ ID NO:131 LPSTG (shown in italics in SEQ ID NO:36 above). In some recombinant host cell systems, it may be preferable to remove this motif to facilitate secretion of a recombinant 01524 protein from the host cell. Alternatively, it may be preferable to use the cell wall anchor motif to anchor the recombinantly expressed protein to the cell wall. The extracellular domain of the expressed protein may be cleaved during purification or the recombinant protein may be left attached to either inactivated host cells or cell membranes in the final composition.

[0985] Three pilin motifs, containing conserved lysine (K) residues have been identified in 01524. The pilin motif sequences are underlined in SEQ ID NO:36, below. Conserved lysine (K) residues are marked in bold, at amino acid residues 128 and 138, amino acid residues 671 and 682, and amino acid residues 809 and 820. The pilin sequences, in particular the conserved lysine residues, are thought to be important for the formation of oligomeric, pilus-like structures of 01524. Preferred fragments of 01524 include at least one conserved lysine residue. Preferably, fragments include at least one pilin sequence.

SEQ ID NO: 36

MLKKCQTFIIESLKKKKHPKEWKIIMWSLMILTTFLTTYFLILPAITVEE
TKTDDVGITLENKNSSQVTSSTSSSQSSVEQSKPQTPASSVTETSSSEEA
AYREEPLMFRGADYTVTVTLTKEAKIPKNADLKVTELKDNSATFKDYKKK
ALTEVAKQDSEIKNFKLYDITIESNGKEAEPQAPVKVEVNYDKPLEASDE
NLKVVHFKDDGQTEVLKSKDTAETKNTSSDVAFKTDSFSIYAIVQEDNTE
VPRLTYHFQNNDGTDYDFLTASGMQVHHQIIKDGESLGEVGIPTIKAGEH
FNGWYTYDPTTGKYGDPVKFGEPITVTETKEICVRPFMSKVATVTLYDDS
AGKSILERYQVPLDSSGNGTADLSSFKVSPPTSTLLFVGWSKTQNGAPLS
ESEIQALPVSSDISLYPVFKESYGVEFNTGDLSTGVTYIAPRRVLTGQPA
STIKPNDPTRPGYTFAGWYTAASGGAAFDFNQVLTKDTTLYAHWSPAQTT
YTINYWQQSATDNKNATDAQKTYEYAGQVTRSGLSLSNQTLTQQDINDKL
PTGFKVNNTRTETSVMIKDDGSSVVNVYYDRKLITIKFAKYGGYSLPEYY
YSYNWSSDADTYTGLYGTTLAANGYQWKTGAWGYLANVGNNQVGTYGMSY
LGEFILPNDTVDSDVIKLFPKGNIVQTYRFFKQGLDGTYSLADTGGGAGA
DEFTFTEKYLGFNVKYYQRLYPDNYLFDQYASQTSAGVKVPISDEYYDRY
GAYHKDYLNLVVWYERNSYKIKYLDPLDNTELPNFPVKDVLYEQNLSSYA
PDTTTVQPKPSRPGYVWDGKWYKDQAQTQVFDFNTTMPPHDVKVYAGWQK
VTYRVNIDPNGGRLSKTDDTYLDLHYGDRIPDYTDITRDYIQDPSGTYYY
KYDSRDKDPDSTKDAYYTTDTSLSNVDTTTKYKYVKDAYKLVGWYYVNPD
GSIRPYNFSGAVTQDINLRAIWRKAGDYHIIYSNDAVGTDGKPALDASGQ
QLQTSNEPTDPDSYDDGSHSALLRRPTMPDGYRFRGWWYNGKIYNPYDSI
DIDAHLADANKNITIKPVIIPVGDIKLEDTSIKYNGNGGTRVENGNVVTQ
VETPRMELNSTTTIPENQYFTRTGYNLIGWHHDKDLADTGRVEFTAGQSI
GIDNNPDATNTLYAVWQPKEYTVRVSKTVVGLDEDKTKDFLFNPSETLQQ
ENFPLRDGQTKEFKVPYGTSISIDEQAYDEFKVSESITEKNLATGEADKT
YDATGLQSLTVSGDVDISFTNTRIKQKVRLQKVNVENDNNFLAGAVFDIY
ESDANGNKASHPMYSGLVTNDKGLLLVDANNYLSLPVGKYYLTETKAPPG
YLLPKNDISVLVISTGVTFEQNGNNATPIKENLVDGSTVYTFKITNSKGT
ELPSTGGIGTHIYILVGLALALPSGLILYYRKKI

[0986] An E box containing a conserved glutamic residue has also been identified in 01524. The E box motif is underlined in SEQ ID NO:36 below. The conserved glutamic acid (E), at amino acid residue 1344, is marked in bold. The E box motif, in particular the conserved glutamic acid residue, is thought to be important for the formation of oligomeric pilus-like structures of 01524. Preferred fragments of 01524 include the conserved glutamic acid residue. Preferably, fragments include the E box motif.

SEQ ID NO: 36

MLKKCQTFIIESLKKKKHPKEWKIIMWSLMILTTFLTTYFLILPAITVEE
TKTDDVGITLENKNSSQVTSSTSSSQSSVEQSKPQTPASSVTETSSSEEA
AYREEPLMFRGADYTVTVTLTKEAKIPKNADLKVTELKDNSATFKDYKKK
ALTEVAKQDSEIKNFKLYDITIESNGKEAEPQAPVKVEVNYDKPLEASDE
NLKVVHFKDDGQTEVLKSKDTAETKNTSSDVAFKTDSFSIYAIVQEDNTE
VPRLTYHFQNNDGTDYDFLTASGMQVHHQIIKDGESLGEVGIPTIKAGEH
FNGWYTYDPTTGKYGDPVKFGEPITVTETKEICVRPFMSKVATVTLYDDS
AGKSILERYQVPLDSSGNGTADLSSFKVSPPTSTLLFVGWSKTQNGAPLS
ESEIQALPVSSDISLYPVFKESYGVEFNTGDLSTGVTYIAPRRVLTGQPA
STIKPNDPTRPGYTFAGWYTAASGGAAFDFNQVLTKDTTLYAHWSPAQTT
YTINYWQQSATDNKNATDAQKTYEYAGQVTRSGLSLSNQTLTQQDINDKL
PTGFKVNNTRTETSVMIKDDGSSVVNVYYDRKLITIKFAKYGGYSLPEYY
YSYNWSSDADTYTGLYGTTLAANGYQWKTGAWGYLANVGNNQVGTYGMSY
LGEFILPNDTVDSDVIKLFPKGNIVQTYRFFKQGLDGTYSLADTGGGAGA
DEFTFTEKYLGFNVKYYQRLYPDNYLFDQYASQTSAGVKVPISDEYYDRY
GAYHKDYLNLVVWYERNSYKIKYLDPLDNTELPNFPVKDVLYEQNLSSYA
PDTTTVQPKPSRPGYVWDGKWYKDQAQTQVFDFNTTMPPHDVKVYAGWQK
VTYRVNIDPNGGRLSKTDDTYLDLHYGDRIPDYTDITRDYIQDPSGTYYY
KYDSRDKDPDSTKDAYYTTDTSLSNVDTTTKYKYVKDAYKLVGWYYVNPD
GSIRPYNFSGAVTQDINLRAIWRKAGDYHIIYSNDAVGTDGKPALDASGQ
QLQTSNEPTDPDSYDDGSHSALLRRPTMPDGYRFRGWWYNGKIYNPYDSI
DIDAHLADANKNITIKPVIIPVGDIKLEDTSIKYNGNGGTRVENGNVVTQ
VETPRMELNSTTTIPENQYFTRTGYNLIGWHHDKDLADTGRVEFTAGQSI
GIDNNPDATNTLYAVWQPKEYTVRVSKTVVGLDEDKTKDFLFNPSETLQQ
ENFPLRDGQTKEFKVPYGTSISIDEQAYDEFKVSESITEKNLATGEADKT
YDATGLQSLTVSGDVDISFTNTRIKQKVRLQKVNVENDNNFLAGAVFDIY
ESDANGNKASHPMYSGLVTNDKGLLLVDANNYLSLPVGKYYLTETKAPPG
YLLPKNDISVLVISTGVTFEQNGNNATPIKENLVDGSTVYTFKITNSKGT
ELPSTGGIGTHIYILVGLALALPSGLILYYRKKI

01525

[0987] An example of an amino acid sequence for 01525 is set forth below. SEQ ID NO:37 represents a 01525 sequence from GBS serotype III, strain isolate COH1.

SEQ ID NO: 37

MKRQISSDKLSQELDRVTYQKRFWSVIKNTIYILMAVASIAILIAVLWLP
VLRIYGHSMNKTLSAGDVVFTVKGSNFKTGDVVAFYYNNKVLVKRVIAES
GDWVNIDSQGDVYVNQHKLKEPYVIHKALGNSNIKYPYQVPDKKIFVLGD
NRKTSIDSRSTSVGDVSEEQIVGKISFRIWPLGKISSIN

### GBS 322

[0988] GBS 322 refers to a surface immunogenic protein, also referred to as “sip”. Nucleotide and amino acid sequences of GBS 322 sequenced from serotype V isolated strain 2603 V/R are set forth in Ref. 3 as SEQ ID 8539 and SEQ ID 8540. These sequences are set forth below as SEQ ID NOS 38 and 39:

SEQ ID NO. 38

ATGAATAAAAAGGTACTATTGACATCGACAATGGCAGCTTCGCTATTATC
AGTCGCAAGTGTTCAAGCACAAGAAACAGATACGACGTGGACAGCACGTA
CTGTTTCAGAGGTAAAGGCTGATTTGGTAAAGCAAGACAATAAATCATCA
TATACTGTGAAATATGGTGATACACTAAGCGTTATTTCAGAAGCAATGTC
AATTGATATGAATGTCTTAGCAAAAATAAATAACATTGCAGATATCAATC
TTATTTATCCTGAGACAACACTGACAGTAACTTACGATCAGAAGAGTCAT
ACTGCCACTTCAATGAAAATAGAAACACCAGCAACAAATGCTGCTGGTCA
AACAACAGCTACTGTGGATTTGAAAACCAATCAAGTTTCTGTTGCAGACC
AAAAAGTTTCTCTCAATACAATTTCGGAAGGTATGACACCAGAAGCAGCA
ACAACGATTGTTTCGCCAATGAAGACATATTCTTCTGCGCCAGCTTTGAA
ATCAAAAGAAGTATTAGCACAAGAGCAAGCTGTTAGTCAAGCAGCAGCTA
ATGAACAGGTATCACCAGCTCCTGTGAAGTCGATTACTTCAGAAGTTCCA
GCAGCTAAAGAGGAAGTTAAACCAACTCAGACGTCAGTCAGTCAGTCAAC
AACAGTATCACCAGCTTCTGTTGCCGCTGAAACACCAGCTCCAGTAGCTA
AAGTAGCACCGGTAAGAACTGTAGCAGCCCCTAGAGTGGCAAGTGTTAAA
GTAGTCACTCCTAAAGTAGAAACTGGTGCATCACCAGAGCATGTATCAGC
TCCAGCAGTTCCTGTGACTACGACTTCACCAGCTACAGACAGTAAGTTAC
AAGCGACTGAAGTTAAGAGCGTTCCGGTAGCACAAAAAGCTCCAACAGCA
ACACCGGTAGCACAACCAGCTTCAACAACAAATGCAGTAGCTGCACATCC
TGAAAATGCAGGGCTCCAACCTCATGTTGCAGCTTATAAAGAAAAAGTAG
CGTCAACTTATGGAGTTAATGAATTCAGTACATACCGTGCGGGAGATCCA
GGTGATCATGGTAAAGGTTTAGCAGTTGACTTTATTGTAGGTACTAATCA
AGCACTTGGTAATAAAGTTGCACAGTACTCTACACAAAATATGGCAGCAA
ATAACATTTCATATGTTATCTGGCAACAAAAGTTTTACTCAAATACAAAC
AGTATTTATGGACCTGCTAATACTTGGAATGCAATGCCAGATCGTGGTGG
CGTTACTGCCAACCACTATGACCACGTTCACGTATCATTTAACAAATAAT
ATAAAAAAGGAAGCTATTTGGCTTCTTTTTTATATGCCTTGAATAGACTT
TCAAGGTTCTTATATAATTTTTATTA

SEQ ID NO. 39

MNKKVLLTSTMAASLLSVASVQAQETDTTWTARTVSEVKADLVKQDNKSS
YTVKYGDTLSVISEAMSIDMNVLAKINNIADINLIYPETTLTVTYDQKSH
TATSMKIETPATNAAGQTTATVDLKTNQVSVADQKVSLNTISEGMTPEAA
TTIVSPMKTYSSAPALKSKEVLAQEQAVSQAAANEQVSPAPVKSITSEVP
AAKEEVKPTQTSVSQSTTVSPASVAAETPAPVAKVAPVRTVAAPRVASVK
VVTPKVETGASPEHVSAPAVPVTTTSPATDSKLQATEVKSVPVAQKAPTA
TPVAQPASTTNAVAAHPENAGLQPHVAAYKEKVASTYGVNEFSTYRAGDP
GDHGKGLAVDFIVGTNQALGNKVAQYSTQNMAANNISYVIWQQKFYSNTN
SIYGPANTWNAMPDRGGVTANHYDHVHVSFNK

[0989] GBS 322 contains an N-terminal leader or signal sequence region which is indicated by the underlined sequence near the beginning of SEQ ID NO:39. In one embodiment, one or more amino acids from the leader or signal sequence region of GBS 322 are removed. An example of such a GBS 322 fragment is set forth below as SEQ ID NO:40.

SEQ ID NO: 40

DLVKQDNKSSYTVKYGDTLSVISEAMSIDMNVLAKINNIADINLIYPETT
LTVTYDQKSHTATSMKIETPATNAAGQTTATVDLKTNQVSVADQKVSLNT
ISEGMTPEAATTIVSPMKTYSSAPALKSKEVLAQEQAVSQAAANEQVSPA
PVKSITSEVPAAKEEVKPTQTSVSQSTTVSPASVAAETPAPVAKVAPVRT
VAAPRVASVKVVTPKVETGASPEHVSAPAVPVTTTSPATDSKLQATEVKS
VPVAQKAPTATPVAQPASTTNAVAAHPENAGLQPHVAAYKEKVASTYGVN
EFSTYRAGDPGDHGKGLAVDFIVGTNQALGNKVAQYSTQNMAANNISYVI
WQQKFYSNTNSIYGPANTWNAMPDRGGVTANHYDHVHVSFNK

[0990] Additional preferred fragments of GBS 322 comprise the immunogenic epitopes identified in WO 03/068813, each of which are specifically incorporated by reference herein.

[0991] There may be an upper limit to the number of GBS proteins which will be in the compositions of the invention. Preferably, the number of GBS proteins in a composition of the invention is less than 20, less than 19, less than 18, less than 17, less than 16, less than 15, less than 14, less than 13, less than 12, less than less than 10, less than 9, less than 8, less than 7, less than 6, less than 5, less than 4, or less than 3. Still more preferably, the number of GBS proteins in a composition of the invention is less than 6, less than 5, or less than 4. Still more preferably, the number of GBS proteins in a composition of the invention is 3.

[0992] The GBS proteins and polynucleotides used in the invention are preferably isolated, i.e., separate and discrete, from the whole organism with which the molecule is found in nature or, when the polynucleotide or polypeptide is not found in nature, is sufficiently free of other biological macromolecules so that the polynucleotide or polypeptide can be used for its intended purpose.

### Group A Streptococcus Adhesin Island Sequences

[0993] The GAS AI polypeptides of the invention can, of course, be prepared by various means (e.g. recombinant expression, purification from GAS, chemical synthesis etc.) and in various forms (e.g. native, fusions, glycosylated, non-glycosylated etc.). They are preferably prepared in substantially pure form (i.e. substantially free from other streptococcal or host cell proteins) or substantially isolated form.

[0994] The GAS AI proteins of the invention may include polypeptide sequences having sequence identity to the identified GAS proteins. The degree of sequence identity may vary depending on the amino acid sequence (a) in question, but is preferably greater than 50% (e.g. 60%, 65%, 70%, 75%, 80%, 85%, 90%, 91%, 92%, 93%, 94%, 95%, 96%, 97%, 98%, 99%, 99.5% or more). Polypeptides having sequence identity include homologs, orthologs, allelic variants and functional mutants of the identified GBS proteins. Typically, 50% identity or more between two proteins is considered to be an indication of functional equivalence. Identity between proteins is preferably determined by the Smith-Waterman homology search algorithm as implemented in the MPSRCH program (Oxford Molecular), using an affinity gap search with parameters gap open penalty=12 and gap extension penalty=1.

[0995] The GAS adhesin island polynucleotide sequences may include polynucleotide sequences having sequence identity to the identified GAS adhesin island polynucleotide sequences. The degree of sequence identity may vary depending on the polynucleotide sequence in question, but is preferably greater than 50% (e.g. 60%, 65%, 70%, 75%, 80%, 85%, 90%, 91%, 92%, 93%, 94%, 95%, 96%, 97%, 98%, 99%, 99.5% or more).

[0996] The GAS adhesin island polynucleotide sequences of the invention may include polynucleotide fragments of the identified adhesin island sequences. The length of the fragment may vary depending on the polynucleotide sequence of the specific adhesin island sequence, but the fragment is preferably at least 10 consecutive polynucleotides, (e.g. at least 10, 12, 14, 16, 18, 20, 25, 30, 35, 40, 50, 60, 70, 80, 90, 100, 150, 200 or more).

[0997] The GAS adhesin island amino acid sequences of the invention may include polypeptide fragments of the identified GAS proteins. The length of the fragment may vary depending on the amino acid sequence of the specific GAS antigen, but the fragment is preferably at least 7 consecutive amino acids, (e.g. 8, 10, 12, 14, 16, 18, 20, 25, 30, 35, 40, 50, 60, 70, 80, 90, 100, 150, 200 or more). Preferably the fragment comprises one or more epitopes from the sequence. Other preferred fragments include (1) the N-terminal signal peptides of each identified GAS protein, (2) the identified GAS protein without their N-terminal signal peptides, and (3) each identified GAS protein wherein up to 10 amino acid residues (e.g. 1, 2, 3, 4, 5, 6, 7, 8, 9, 10, 15, 20, 25 or more) are deleted from the N-terminus and/or the C-terminus e.g. the N-terminal amino acid residue may be deleted. Other fragments omit one or more domains of the protein (e.g. omission of a signal peptide, of a cytoplasmic domain, of a transmembrane domain, or of an extracellular domain).

[0998] GAS AI-1 sequences

[0999] As discussed above, a GAS AI-1 sequence is present in an M6 strain isolate (MGAS10394). Examples of GAS AI-1 sequences from M6 strain isolate MGAS 10394 are set forth below.

[1000] M6_Spy0156: Spy0156 is a rofA transcriptional regulator. An example of an amino acid sequence for M6_Spy0156 is set forth in SEQ ID NO:41.

SEQ ID NO: 41

MIEKYLESSIESKCQLVVLFFKTSYLPITEVAEKTGLTFLQLNHYCEELN
AFFPDSLSMTIQKRMISCQFTHPFKETYLYQLYASSNVLQLLAFLIKNGS
HSRPLTDFARSHFLSNSSAYRMREALIPLLRNFELKLSKNKIVGEEYRIR
YLIALLYSKFGIKVYDLTQQDKNTIHSFLSHSSTHLKTSPWLSESFSFYD
ILLALSWKRHQFSVTIPQTRIFQQLKKLFIYDSLKKSSRDIIETYCQLNF
SAGDLDYLYLIYITANNSFASLQWTPEHIRQCCQLFEENDTFRLLLKPII
TLLPNLKEQKPSLVKALMFFSKSFLFNLQHFIPETNLFVSPYYKGNQKLY
TSLKLIVEEWLAKLPGKRYLNHKHFHLFCHYVEQILRNIQPPLVVVFVAS
NFINAHLLTDSFPRYFSDKSIDFHSYIAR

[1001] M6_Spy0157: M6_Spy0157 is a fibronectin binding protein. It contains a sortase substrate motif LPXTG (SEQ ID NO:122), shown in italics in the amino acid sequence SEQ ID NO:42.

SEQ ID NO: 42

MVSSYMFVRGEKMNNKIFLNKEASFLAHTKRKRRFAVTLVGVFFMLLACA
GAIGFGQVAYAADEKTVPSHSSPNPEFPWYGYDAYGKEYPGYNIWTRYHD
LRVNLNGSRSYQVYCFNIQSNYPSQKNSFIKNWFKKIEGNGKSFVDYAHT
TKLGKEELEQRLLSLLYNAYPNDANGYMKGLEHLNAITVTQYAVWHYSDN
SQYQFETLWESEAKEGKISRSQVTLMREALKKLIDPNLEATAVNKIPSGY
RLNIFESENEAYQNLLSAEYVPDDPPKPGETSEHNPKTPELDGTPIPEDP
KHPDDNLEPTLPPVMLDGEEVPEVPSESLEPALPPLMPELDGQEVPEKPS
IDLPIEVPRYEFNNKDQSPLAGESGETEYITEVYGNQQNPVDIDKKLPNE
TGFSGNMVETEDTKEPEVLMGGQSESVEFTKDTQTGMSGQTTPQVETEDT
KEPEVLMGGQSESVEFTKDTQTGMSGQTTPQIETEDTKEPEVLMGGQSES
VEFTKDTQTGMSGQTTPQIETEDTKEPEVLMGGQSESVEFTKDTQTGMSG
FSETATVVEDTRPKLVFHFDNNEPKVEENREKPTKNITPILPATGDIENV
LAFLGILILSVLSIFSLLKNKQSNKKV

[1002] M6_Spy0157 contains an amino acid motif indicative of a cell wall anchor: SEQ ID NO:180 LPATG (shown in italics in SEQ ID NO:42, above). In some recombinant host cell systems, it may be preferable to remove this motif to facilitate secretion of a recombinant M6_Spy0157 protein from the host cell. Alternatively, in other recombinant host cell systems, it may be preferable to use the cell wall anchor motif to anchor the recombinantly expressed protein to the cell wall. The extracellular domain of the expressed protein may be cleaved during purification or the recombinant protein may be left attached to either inactivated host cells or cell membranes in the final composition.

[1003] A pilin motif, discussed above, containing a conserved lysine (K) residue has also been identified in M6_Spy0157. The pilin motif sequence is underlined in SEQ ID NO:42, below. Conserved lysine (K) residues are also marked in bold, at amino acid residues 277, 287, and 301. The pilin sequence, in particular the conserved lysine residues, are thought to be important for the formation of oligomeric, pilus-like structures. Preferred fragments of M6_Spy0157 include at least one conserved lysine residue. Preferably, fragments include the pilin sequence.

SEQ ID NO: 42

MVSSYMFVRGEKMNNKIFLNKEASFLAHTKRKRRFAVTLVGVFFMLLACA
GAIGFGQVAYAADEKTVPSHSSPNPEFPWYGYDAYGKEYPGYNIWTRYHD
LRVNLNGSRSYQVYCFNIQSNYPSQKNSFIKNWFKKIEGNGKSFVDYAHT
TKLGKEELEQRLLSLLYNAYPNDANGYMKGLEHLNAITVTQYAVWHYSDN
SQYQFETLWESEAKEGKISRSQVTLMREALKKLIDPNLEATAVNKIPSGY
RLNIFESENEAYQNLLSAEYVPDDPPKPGETSEHNPKTPELDGTPIPEDP
KHPDDNLEPTLPPVMLDGEEVPEVPSESLEPALPPLMPELDGQEVPEKPS
IDLPIEVPRYEFNNKDQSPLAGESGETEYITEVYGNQQNPVDIDKKLPNE
TGFSGNMVETEDTKEPEVLMGGQSESVEFTKDTQTGMSGQTTPQVETEDT
KEPEVLMGGQSESVEFTKDTQTGMSGQTTPQIETEDTKEPEVLMGGQSES
VEFTKDTQTGMSGQTTPQIETEDTKEPEVLMGGQSESVEFTKDTQTGMSG
FSETATVVEDTRPKLVFHFDNNEPKVEENREKPTKNITPILPATGDIENV
LAFLGILILSVLSIFSLLKNKQSNKKV

[1004] A repeated series of four E boxes containing a conserved glutamic residue have been identified in M6_Spy0157. The E-box motifs are underlined in SEQ ID NO:42, below. The conserved glutamic acid (E) residues, at amino acid residues 415, 452, 489, and 526 are marked in bold. The E box motif, in particular the conserved glutamic acid residue, is thought to be important for the formation of oligomeric pilus-like structures of M6_Spy0157. Preferred fragments of M6_Spy0157 include at least one conserved glutamic acid residue. Preferably, fragments include at least one E box motif.

SEQ ID NO: 42

MVSSYMFVRGEKMNNKIFLNKEASFLAHTKRKRRFAVTLVGVFFMLLACA
GAIGFGQVAYAADEKTVPSHSSPNPEFPWYGYDAYGKEYPGYNIWTRYHD
LRVNLNGSRSYQVYCFNIQSNYPSQKNSFIKNWFKKIEGNGKSFVDYAHT
TKLGKEELEQRLLSLLYNAYPNDANGYMKGLEHLNAITVTQYAVWHYSDN
SQYQFETLWESEAKEGKISRSQVTLMREALKKLIDPNLEATAVNKIPSGY
RLNIFESENEAYQNLLSAEYVPDDPPKPGETSEHNPKTPELDGTPIPEDP
KHPDDNLEPTLPPVMLDGEEVPEVPSESLEPALPPLMPELDGQEVPEKPS
IDLPIEVPRYEFNNKDQSPLAGESGETEYITEVYGNQQNPVDIDKKLPNE
TGFSGNMVETEDTKEPEVLMGGQSESVEFTKDTQTGMSGQTTPQVETEDT
KEPEVLMGGQSESVEFTKDTQTGMSGQTTPQIETEDTKEPEVLMGGQSES
VEFTKDTQTGMSGQTTPQIETEDTKEPEVLMGGQSESVEFTKDTQTGMSG
FSETATVVEDTRPKLVFHFDNNEPKVEENREKPTKNITPILPATGDIENV
LAFLGILILSVLSIFSLLKNKQSNKKV

[1005] M6_Spy0158: M6_Spy0158 is a reverse transcriptase. An example of Spy0158 is shown in the amino acid sequence SEQ ID NO 43.

SEQ ID NO: 43

MSLRHQNKKGIRKEGWKSRPQSRWSDHCQLVAQKSVLKQAISKTVLA
ERGLFSCLDDYLERHALKVN

[1006] M6_Spy0159: M6_Spy0159 is a collagen adhesion protein. It contains a sortase substrate motif LPXSG, shown in italics in the amino acid sequence SEQ ID NO:44.

SEQ ID NO: 44

MYSRLKRELVIVINRKKKYKLIRLMVTVGLIFSQLVLPIRRLGLQMISTQ
TKVIPQEIVTQTETQGTQVVATKQKLESENSSLKVALKRESGFEHNATID
ASLDTESQGDNSQRSVTQAIVTMALELRKQGLSIVDTKIVRIQSSTNQRN
DITTTLTFKNGLSLEGASTEANDPNVRVGIVNPNDTVQTITPTIKQDADG
KVKNLVFTGRLGKQVIIVSTTRLKEEQTISLDSYGELVIDGAVGLSQKDR
PPYSKPITVNILKPKLSSIESSLDSKDFEIVKTIDNLYTWDDQFYLLDFI
SKQYEVLKTDYQSAKDSTPQTRDILFGEYTVEPLVMNKGHNNTINIYIRS
TRPLGLKPIGAAPALIQPRSFRSLTPRSTRMKRSAPVEKFEGELEHHKRI
DYLGDNQNNPDTTIDDKEDEHDTSDLYRLYLDMTGKKNPLDILVVVDKSG
SMQEGIGSVQRYRYYAQRWDDYYSQWVYHGTFDYSSYQGESFNRGQIHYR
YRGIVSVSDGIRRDDAVKNSLLGVNGLLQRFVNINPENKLSVIGFQGSAD
YHAGKWYPDQSPRGGFYQPNLNNSRDAELLKGWSTNSLLDPNTLTALHNN
GTNYHAALLKAKEILNEVKDDGRRKIMIFISDGVPTFYFGEDGYRSGNGS
SNDRNNVTRSQEGSKLAIDEFKARYPNLSIYSLGVSKDINSDTASSSPVV
LKYLSGEEHYYGITDTAELEKTLNKIVEDSKLSQLGISDSLSQYVDYYDK
QPDVLVTRKSKVNDETEILYQKDQVQEAGKDIIDKVVFTPKTTSQPKGKV
TLTFKSDYKVDDEYTYTLSFNVKASDEAYEKYKDNEGRYSEMGDSDTDYG
TNQTSSGKGGLPSNSDASVNYMADGREQKLPYKHPVIQVKTVPITFTKVD
ADNNQKKLAGVEFELRKEDKKIVWEKGTTGSNGQLNFKYLQKGKTYYLYE
TKAKLGYTLPENPWEVAVANNGDIKVKHPIEGELKSKDGSYMIKNYKTYQ
LPSSGGRGSQIFIIVGSMTATVALLFYRRQHRKKQY

[1007] M6 Spy0159 contains an amino acid motif indicative of a cell wall anchor: SEQ ID NO:181 LPSSG (shown in italics in SEQ ID NO:44, above). In some recombinant host cell systems, it may be preferable to remove this motif to facilitate secretion of a recombinant M6_Spy0159 protein from the host cell. Alternatively, in other recombinant host cell systems, it may be preferable to use the cell wall anchor motif to anchor the recombinantly expressed protein to the cell wall. The extracellular domain of the expressed protein may be cleaved during purification or the recombinant protein may be left attached to either inactivated host cells or cell membranes in the final composition.

[1008] A pilin motif, discussed above, containing a conserved lysine (K) residue has also been identified in M6_Spy0159. The pilin motif sequence is underlined in SEQ ID NO:44, below. Conserved lysine (K) residues are also marked in bold, at amino acid residues 265 and 276. The pilin sequence, in particular the conserved lysine residues, are thought to be important for the formation of oligomeric, pilus-like structures. Preferred fragments of M6_Spy0159 include at least one conserved lysine residue. Preferably, fragments include the pilin sequence.

SEQ ID NO: 44

MYSRLKRELVIVINRKKKYKLIRLMVTVGLIFSQLVLPIRRLGLQMISTQ
TKVIPQEIVTQTETQGTQVVATKQKLESENSSLKVALKRESGFEHNATID
ASLDTESQGDNSQRSVTQAIVTMALELRKQGLSIVDTKIVRIQSSTNQRN
DITTTLTFKNGLSLEGASTEANDPNVRVGIVNPNDTVQTITPTIKQDADG
KVKNLVFTGRLGKQVIIVSTTRLKEEQTISLDSYGELVIDGAVGLSQKDR
PPYSKPITVNILKPKLSSIESSLDSKDFEIVKTIDNLYTWDDQFYLLDFI
SKQYEVLKTDYQSAKDSTPQTRDILFGEYTVEPLVMNKGHNNTINIYIRS
TRPLGLKPIGAAPALIQPRSFRSLTPRSTRMKRSAPVEKFEGELEHHKRI
DYLGDNQNNPDTTIDDKEDEHDTSDLYRLYLDMTGKKNPLDILVVVDKSG
SMQEGIGSVQRYRYYAQRWDDYYSQWVYHGTFDYSSYQGESFNRGQIHYR
YRGIVSVSDGIRRDDAVKNSLLGVNGLLQRFVNINPENKLSVIGFQGSAD
YHAGKWYPDQSPRGGFYQPNLNNSRDAELLKGWSTNSLLDPNTLTALHNN
GTNYHAALLKAKEILNEVKDDGRRKIMIFISDGVPTFYFGEDGYRSGNGS
SNDRNNVTRSQEGSKLAIDEFKARYPNLSIYSLGVSKDINSDTASSSPVV
LKYLSGEEHYYGITDTAELEKTLNKIVEDSKLSQLGISDSLSQYVDYYDK
QPDVLVTRKSKVNDETEILYQKDQVQEAGKDIIDKVVFTPKTTSQPKGKV
TLTFKSDYKVDDEYTYTLSFNVKASDEAYEKYKDNEGRYSEMGDSDTDYG
TNQTSSGKGGLPSNSDASVNYMADGREQKLPYKHPVIQVKTVPITFTKVD
ADNNQKKLAGVEFELRKEDKKIVWEKGTTGSNGQLNFKYLQKGKTYYLYE
TKAKLGYTLPENPWEVAVANNGDIKVKHPIEGELKSKDGSYMIKNYKIYQ
LPSSGGRGSQIFIIVGSMTATVALLFYRRQHRKKQY

[1009] An E box containing a conserved glutamic residue has been identified in M6_Spy0159. The E-box motif is underlined in SEQ ID NO:44, below. The conserved glutamic acid (E), at amino acid residue 950, is marked in bold. The E box motif, in particular the conserved glutamic acid residue, is thought to be important for the formation of oligomeric pilus-like structures of M6_Spy0159. Preferred fragments of M6_Spy0159 include the conserved glutamic acid residue. Preferably, fragments include the E box motif.

SEQ ID NO: 44

MYSRLKRELVIVINRKKKYKLIRLMVTVGLIFSQLVLPIRRLGLQMISTQ
TKVIPQEIVTQTETQGTQVVATKQKLESENSSLKVALKRESGFEHNATID
ASLDTESQGDNSQRSVTQAIVTMALELRKQGLSIVDTKIVRIQSSTNQRN
DITTTLTFKNGLSLEGASTEANDPNVRVGIVNPNDTVQTITPTIKQDADG
KVKNLVFTGRLGKQVIIVSTTRLKEEQTISLDSYGELVIDGAVGLSQKDR
PPYSKPITVNILKPKLSSIESSLDSKDFEIVKTIDNLYTWDDQFYLLDFI
SKQYEVLKTDYQSAKDSTPQTRDILFGEYTVEPLVMNKGHNNTINIYIRS
TRPLGLKPIGAAPALIQPRSFRSLTPRSTRMKRSAPVEKFEGELEHHKRI
DYLGDNQNNPDTTIDDKEDEHDTSDLYRLYLDMTGKKNPLDILVVVDKSG
SMQEGIGSVQRYRYYAQRWDDYYSQWVYHGTFDYSSYQGESFNRGQIHYR
YRGIVSVSDGIRRDDAVKNSLLGVNGLLQRFVNINPENKLSVIGFQGSAD
YHAGKWYPDQSPRGGFYQPNLNNSRDAELLKGWSTNSLLDPNTLTALHNN
GTNYHAALLKAKEILNEVKDDGRRKIMIFISDGVPTFYFGEDGYRSGNGS
SNDRNNVTRSQEGSKLAIDEFKARYPNLSIYSLGVSKDINSDTASSSPVV
LKYLSGEEHYYGITDTAELEKTLNKIVEDSKLSQLGISDSLSQYVDYYDK
QPDVLVTRKSKVNDETEILYQKDQVQEAGKDIIDKVVFTPKTTSQPKGKV
TLTFKSDYKVDDEYTYTLSFNVKASDEAYEKYKDNEGRYSEMGDSDTDYG
TNQTSSGKGGLPSNSDASVNYMADGREQKLPYKHPVIQVKTVPITFTKVD
ADNNQKKLAGVEFELRKEDKKIVWEKGTTGSNGQLNFKYLQKGKTYYLYE
TKAKLGYTLPENPWEVAVANNGDIKVKHPIEGELKSKDGSYMIKNYKIYQ
LPSSGGRGSQIFIIVGSMTATVALLFYRRQHRKKQY

[1010] M6_Spy0160: M6_Spy0160 is a fimbrial structural subunit. It contains a sortase substrate motif LPXTG (SEQ ID NO:122), shown in italics in amino acid sequence SEQ ID NO:45.

SEQ ID NO: 45

MTNRRETVREKILITAKKLMLACLAILAVVGLGMTRVSALSKDDTAQLKI
TNIEGGPTVTLYKIGEGVYNTNGDSFINFKYAEGVSLTETGPTSQEITTI
ANGINTGKIKPFSTENVSISNGTATYNARGASVYIALLTGATDGRTYNPI
LLAASYNGEGNLVTKNIDSKSNYLYGQTSVAKSSLPSITKKVTGTIDDVN
KKTTSLGSVLSYSLTFELPSYTKEAVNKTVYVSDNMSEGLTFNFNSLTVE
WKGKMANITEDGSVMVENTKIGIAKEVNNGFNLSFIYDSLESISPNISYK
AVVNNKAIVGEEGNPNKAEFFYSNNPTKGNTYDNLDKKPDKGNGITSKED
SKIVYTYQIAFRKVDSVSKTPLIGAIFGVYDTSNKLIDIVTTNKNGYAIS
TQVSSGKYKIKELKAPKGYSLNTETYEITANWVTATVKTSANSKSTTYTS
DKNKATDNSEQVGWLKNGIFYSIDSRPTGNDVKEAYIESTKALTDGTTFS
KSNEGSGTVLLETDIPNTKLGELPSTGSIGTYLFKAIGSAAMIGAIGIYI
VKRRKA

[1011] M6_Spy0160 contains an amino acid motif indicative of a cell wall anchor: SEQ ID NO:131 LPSTG (shown in italics in SEQ ID NO:45, above). In some recombinant host cell systems, it may be preferable to remove this motif to facilitate secretion of a recombinant M6_Spy0160 protein from the host cell. Alternatively, in other recombinant host cell systems, it may be preferable to use the cell wall anchor motif to anchor the recombinantly expressed protein to the cell wall. The extracellular domain of the expressed protein may be cleaved during purification or the recombinant protein may be left attached to either inactivated host cells or cell membranes in the final composition.

[1012] An E box containing a conserved glutamic residue has been identified in M6_Spy0160. The E-box motif is underlined in SEQ ID NO:45, below. The conserved glutamic acid (E), at amino acid residue 412, is marked in bold. The E box motif, in particular the conserved glutamic acid residue, is thought to be important for the formation of oligomeric pilus-like structures of M6_Spy0160. Preferred fragments of M6_Spy0160 include the conserved glutamic acid residue. Preferably, fragments include the E box motif.

SEQ ID NO: 45

MTNRRETVREKILITAKKLMLACLAILAVVGLGMTRVSALSKDDTAQLKI
TNIEGGPTVTLYKIGEGVYNTNGDSFINFKYAEGVSLTETGPTSQEITTI
ANGINTGKIKPFSTENVSISNGTATYNARGASVYIALLTGATDGRTYNPI
LLAASYNGEGNLVTKNIDSKSNYLYGQTSVAKSSLPSITKKVTGTIDDVN
KKTTSLGSVLSYSLTFELPSYTKEAVNKTVYVSDNMSEGLTFNFNSLTVE
WKGKMANITEDGSVMVENTKIGIAKEVNNGFNLSFIYDSLESISPNISYK
AVVNNKAIVGEEGNPNKAEFFYSNNPTKGNTYDNLDKKPDKGNGITSKED
SKIVYTYQIAFRKVDSVSKTPLIGAIFGVYDTSNKLIDIVTTNKNGYAIS
TQVSSGKYKIKELKAPKGYSLNTETYEITANWVTATVKTSANSKSTTYTS
DKNKATDNSEQVGWLKNGIFYSIDSRPTGNDVKEAYIESTKALTDGTTFS
KSNEGSGTVLLETDIPNTKLGELPSTGSIGTYLFKAIGSAAMIGAIGIYI
VKRRKA

[1013] M6_Spy0161 is a srtB type sortase. An example of an amino acid sequence of M6_Spy-161 is shown in SEQ ID NO:46.

SEQ ID NO: 46

MTERLKNLGILLLFLLGTAIFLYPTLSSQWNAYRDRQLLSTYHKQVIQKK
PSEMEEVWQKAKAYNARLGIQPVPDAFSFRDGIHDKNYESLLQIENNDIM
GYVEVPSIKVTLPIYHYTTDEVLTKGAGHLFGSALPVGGDGTHTVISAHR
GLPSAEMFTNLNLVKKGDTFYFRVLNKVLAYKVDQILIVEPDQATSLSGV
MGKDYATLVTCTPYGVNTKRLLVRGHRIAYHYKKYQQAKKAMKLVDKSRM
WAEVVCAAFGVVIAIILVFMYSRVSAKKSK

[1014] As discussed above, applicants have also determined the nucleotide and encoded amino acid sequence of fimbrial structural subunits in several other GAS AI-1 strains of bacteria. Examples of sequences of these fimbrial structural subunits are set forth below.

[1015] M6 strain isolate CDC SS 410 is a GAS AI-1 strain of bacteria. CDC SS 410_fimbrial is thought to be a fimbrial structural subunit of M6 strain isolate CDC SS 410. An example of a nucleotide sequence encoding the CDC SS 410_fimbrial protein (SEQ ID NO:267) and a CDC SS 410_fimbrial protein amino acid sequence (SEQ ID NO:268) are set forth below.

SEQ ID NO: 267

AAAGATGATACTGCACAACTAAAGATAACAAATATTGAAGGTGGGCCAAC
AGTAACACTTTATAAAATAGGAGAAGGTGTTTACAACACTAATGGTGATT
CTTTTATTAACTTTAAATATGCTGAGGGGGTTTCTTTAACTGAAACAGGA
CCTACATCACAAGAAATTACTACTATTGCAAATGGTATTAATACGGGTAA
AATAAAGCCTTTTAGTACTGAAAACGTTAGTATTTCTAATGGAACAGCAA
CTTATAATGCGAGAGGTGCATCTGTTTATATTGCATTATTAACAGGTGCG
ACAGATGGCCGTACCTACAATCCTATTTTATTAGCTGCATCTTATAATGG
TGAGGGAAATTTAGTTACTAAAAATATTGATTCCAAATCTAATTATTTAT
ATGGACAAACAAGTGTTGCAAAATCATCATTACCATCTATTACAAAGAAA
GTAACCGGGACAATAGATGACGTGAATAAAAAGACTACCTCGTTAGGAAG
TGTATTGTCTTATTCGCTGACATTTGAATTACCAAGTTATACCAAAGAAG
CAGTCAATAAAACAGTATATGTTTCTGATAATATGTCGGAAGGTCTTACT
TTTAACTTTAATAGTCTTACAGTAGAATGGAAAGGTAAGATGGCTAATAT
TACTGAAGATGGTTCAGTAATGGTAGAAAATACAAAAATCGGAATAGCTA
AGGAGGTTAATAACGGTTTTAATTTAAGTTTTATTTATGATAGTTTAGAA
TCTATATCACCAAATATAAGTTATAAAGCTGTTGTAAACAATAAAGCTAT
TGTTGGTGAAGAGGGTAATCCTAATAAAGCTGAATTCTTCTATTCAAATA
ATCCAACAAAAGGTAATACATACGATAATTTAGATAAGAAGCCTGATAAA
GGGAATGGTATTACATCCAAAGAAGATTCTAAAATTGTTTATACTTATCA
AATAGCGTTTAGAAAAGTTGATAGTGTTAGTAAGACCCCACTTATTGGTG
CAATTTTTGGAGTTTATGATACTAGTAATAAATTAATTGATATTGTTACA
ACCAATAAAAATGGATATGCTATTTCAACACAAGTATCTTCAGGAAAATA
TAAAATTAAGGAATTAAAAGCTCCTAAAGGTTATTCATTGAATACAGAAA
CTTATGAAATTACGGCAAATTGGGTAACTGCTACAGTCAAGACAAGTGCT
AATTCAAAAAGTACTACTTATACATCTGATAAAAATAAGGCGACAGATAA
TTCAGAGCAAGTAGGATGGTTAAAAAATGGTATATTCTATTCTATAGATA
GTAGACCTACAGGAAATGATGTTAAAGAGGCTTATATTGAATCTACTAAG
GCTTTAACTGATGGAACAACTTTCTCAAAATCGAATGAAGGTTCAGGTAC
AGTATTATTAGAAACTGACATCCCTAACACCAAGCTAGGTGAACTC

SEQ ID NO: 268

KDDTAQLKITNIEGGPTVTLYKIGEGVYNTNGDSFINFKYAEGVSLTETG
PTSQEITTIANGINTGKIKPFSTENVSISNGTATYNARGASVYIALLTGA
TDGRTYNPILLAASYNGEGNLVTKNIDSKSNYLYGQTSVAKSSLPSITKK
VTGTIDDVNKKTTSLGSVLSYSLTFELPSYTKEAVNKTVYVSDNMSEGLT
FNFNSLTVEWKGKMANITEDGSVMVENTKIGIAKEVNNGFNLSFIYDSLE
SISPNISYKAVVNNKAIVGEEGNPNKAEFFYSNNPTKGNTYDNLDKKPDK
GNGITSKEDSKIVYTYQIAFRKVDSVSKTPLIGAIFGVYDTSNKLIDIVT
TNKNGYAISTQVSSGKYKIKELKAPKGYSLNTETYEITANWVTATVKTSA
NSKSTTYTSDKNKATDNSEQVGWLKNGIFYSIDSRPTGNDVKEAYIESTK
ALTDGTTFSKSNEGSGTVLLETDIPNTKLGEL

[1016] M6 strain isolate ISS 3650 is a GAS AI-1 strain of bacteria. ISS3650_fimbrial is thought to be a fimbrial structural subunit of M6 strain isolate ISS 3650. An example of a nucleotide sequence encoding the ISS3650_fimbrial protein (SEQ ID NO:269) and an ISS3650_fimbrial protein amino acid sequence (SEQ ID NO:270) are set forth below.

SEQ ID NO: 269

GAATGGAAAGGTAAGATGGCTAATATTACTGAAGATGGTTCAGTAATGGT
AGAAAATACAAAAATCGGAATAGCTAAGGAGGTTAATAACGGTTTTAATT
TAAGTTTTATTTATGATAGTTTAGAATCTATATCACCAAATATAAGTTAT
AAAGCTGTTGTAAACAATAAAGCTATTGTTGGTGAAGAGGGTAATCCTAA
TAAAGCTGAATTCTTCTATTCAAATAATCCAACAAAAGGTAATACATACG
ATAATTTAGATAAGAAGCCTGATAAAGGGAATGGTATTACATCCAAAGAA
GATTCTAAAATTGTTTATACTTATCAAATAGCGTTTAGAAAAGTTGATAG
TGTTAGTAAGACCCCACTTATTGGTGCAATTTTTGGAGTTTATGATACTA
GTAATAAATTAATTGATATTGTTACAACCAATAAAAATGGATATGCTATT
TCAACACAAGTATCTTCAGGAAAATATAAAATTAAGGAATTAAAAGCTCC
TAAAGGTTATTCATTGAATACAGAAACTTATGAAATTACGGCAAATTGGG
TAACTGCTACAGTCAAGACAAGTGCTAATTCAAAAAGTACTACTTATACA
TCTGATAAAAATAAGGCGACAGATAATTCAGAGCAAGTAGGATGGTTAAA
AAATGGTATATTCTATTCTATAGATAGTAGACCTACAGGAAATGATGTTA
AAGAGGCTTATATTGAATCTACTAAGGCTTTAACTGATGGAACAACTTTC
TCAAAATCGAATGAAGGTTCAGGTACAGTATTATTAGAAACTGACATCC

SEQ ID NO: 270

EWKGKMANITEDGSVMVENTKIGIAKEVNNGFNLSFIYDSLESISPNISY
KAVVNNKAIVGEEGNPNKAEFFYSNNPTKGNTYDNLDKKPDKGNGITSKE
DSKIVYTYQIAFRKVDSVSKTPLIGAIFGVYDTSNKLIDIVTTNKNGYAI
STQVSSGKYKIKELKAPKGYSLNTETYEITANWVTATVKTSANSKSTTYT
SDKNKATDNSEQVGWLKNGIFYSIDSRPTGNDVKEAYIESTKALTDGTTF
SKSNEGSGTVLLETDI

[1017] M23 strain isolate DSM2071 is a GAS AI-1 strain of bacteria. DSM2071 fimbrial is thought to be a fimbrial structural subunit of M23 strain DSM2071. An example of a nucleotide sequence encoding the DSM2071_fimbrial protein (SEQ ID NO:251) and a DSM2071_fimbrial protein amino acid sequence (SEQ ID NO:252) are set forth below.

SEQ ID NO: 251

ATGAGAGAGAAAATATTAATAGCAGCAAAAAAACTAATGCTAGCTTGTTT
AGCTATCTTAGCTGTAGTAGGGCTTGGAATGACAAGAGTATCAGCTTTAT
CAAAAGATGATAAGGCGGAGTTGAAGATAACAAATATCGAAGGTAAACCG
ACCGTGACACTGTATAAAATTGGTGATGGAAAATACAGTGAGCGAGGGGA
TTCTTTTATTGGATTTGAGTTAAAGCAAGGTGTGGAGCTAAATAAGGCAA
AACCTACATCTCAAGAAATAAATAAAATCGCTAATGGTATTAATAAAGGT
AGTGTTAAGGCTGAAGTAGTTAATATAAAAGAACATGCTAGTACAACTTA
TAGTTATACAACAACTGGTGCAGGTATTTACTTGGCTATATTGACTGGAG
CTACTGATGGACGTGCCTATAATCCTATCTTACTGACAGCTTCTTACAAT
GAGGAAAATCCACTTAAGGGAGGGCAGATTGACGCAACTAGTCATTATCT
TTTTGGAGAAGAAGCAGTTGCTAAATCTAGCCAACCAACAATTAGCAAGT
CAATTACAAAATCCACAAAAGATGGTGATAAAGATACAGCATCTGTAGGT
GAAAAAGTTGATTACAAATTAACTGTTCAGTTACCAAGTTATTCGAAAGA
TGCTATCAATAAAACGGTGTTTATCACTGACAAATTGTCTCAGGGACTTA
CTTTCCTTCCAAAAAGTTTAAAGATTATCTGGAATGGTCAAACGTTAACA
AAGGTGAATGAAGAATTTAAAGCTGGAGATAAGGTAATTGCTCAACTTAA
GGTTGAAAATAATGGATTTAATCTGAACTTTAATTATGATAACCTTGATA
ATCATGCCCCAGAAGTTAACTATAGTGCTCTACTAAATGAAAACGCAGTT
GTTGGTAAAGGTGGTAATGACAATAATGTAGACTATTACTATTCAAATAA
TCCGAATAAAGGAGAGACCCATAAAACAACTGAGAAGCCTAAAGAGGGTG
AAGGTACTGGTATCACTAAAAAGACGGATAAAAAAACCGTCTACACCTAT
CGTGTAGCCTTTAAGAAAACAGGCAAAGATCATGCCCCACTAGCTGGTGC
TGTTTTCGGTATCTATTCAGATAAGGAAGCGAAACAATTAGTCGATATTG
TTGTGACAAATGCACAGGGTTATGCAGCATCAAGCGAAGTTGGGAAAGGG
ACTTATTACATTAAAGAAATTAAATCCCCTAAGGGTTACTCTTTAAATAC
AAATATTTATGAAGTGGAAACTTCATGGGAAAAAGCTACAACGACTTCTA
CAACTAATCGTTTAGAGACAATTTATACAACAGATGATAATCAAAAGTCT
CCAGGAACTAATACAGTTGGTTGGTTGGAAGATGGTGTCTTTTACAAAGA
AAATCCAGGTGGTGATGCTAAACTTGCCTATATCAAACAATCAACAGAGG
AGACTTCTACAACTATAGAAGTCAAAGAAAATCAAGCTGAAGGTTCAGGT
ACGGTATTATTAGAAACTGAAATTCCTAACACCAAATTAGGTGAATTACC
TTCGACAGGTAGCATTGGTACTTACCTCTTTAAAGCTATTGGTTCGGCTG
CTATGATCGGTGCAATTGGTATTTATATTGTTAAACGTCGTAAAGCTTAA

SEQ ID NO: 252

MREKILIAAKKLMLACLAILAVVGLGMTRVSALSKDDKAELKITNIEGKP
TVTLYKIGDGKYSERGDSFIGFELKQGVELNKAKPTSQEINKIANGINKG
SVKAEVVNIKEHASTTYSYTTTGAGIYLAILTGATDGPAYNPILLTASYN
EENPLKGGQIDATSHYLFGEEAVAKSSQPTISKSITKSTKDGDKDTASVG
EKVDYKLTVQLPSYSKDAINKTVFITDKLSQGLTFLPKSLKIIWNGQTLT
KVNEEFKAGDKVIAQLKVENNGFNLNFNYDNLDNHAPEVNYSALLNENAV
VGKGGNDNNVDYYYSNNPNKGETHKTTEKPKEGEGTGITKKTDKKTVYTY
RVAFKKTGKDHAPLAGAVFGIYSDKEAKQLVDIVVTNAQGYAASSEVGKG
TYYIKEIKSPKGYSLNTNIYEVETSWEKATTTSTTNRLETIYTTDDNQKS
PGTNTVGWLEDGVFYKENPGGDAKLAYIKQSTEETSTTIEVKENQAEGSG
TVLLETEIPNTKLGELPSTGSIGTYLFKAIGSAAMIGAIGIYIVKRRKA

[1018] GAS AI-2 Sequences

[1019] As discussed above, a GAS AI-2 sequence is present in an M1 strain isolate (SF370). Examples of GAS AI-2 sequences from M1 strain isolate SF370 are set forth below.

[1020] Spy0124 is a rofA transcriptional regulator. An example of an amino acid sequence for Spy0124 is set forth in SEQ ID NO:47.

SEQ ID NO: 47

MIEKYLESSIESKCQLIVLFFKTSYLPITEVAEKTGLTFLQLNHYCEELN
AFFPGSLSMTIQKRMISCQFTHPFKETYLYQLYASSNVLQLLAFLIKNGS
HSRPLTDFARSHFLSNSSAYRMREALIPLLRNFELKLSKNKIVGEEYRIR
YLIALLYSKFGIKVYDLTQQDKNTIHSFLSHSSTHLKTSPWLSESFSFYD
ILLALSWKRHQFSVTIPQTRIFQQLKKLFVYDSLKKSSHDIIETYCQLNF
SAGDLDYLYLIYITANNSFASLQWTPEHIRQYCQLFEENDTFRLLLNPII
TLLPNLKEQKASLVKALMFFSKSFLFNLQHFIPETNLFVSPYYKGNQKLY
TSLKLIVEEWMAKLPGKRDLNHKHFHLFCHYVEQSLRNIQPPLVVVFVAS
NFINAHLLTDSFPRYFSDKSIDFHSYYLLQDNVYQIPDLKPDLVITHSQL
IPFVHHELTKGIAVAEISFDESILSIQELMYQVKEEKFQADLTKQLT

[1021] GAS 015 is also referred to as Cpa. It contains a sortase substrate motif VVXTG (SEQ ID NO:135), shown in italics in SEQ ID NO:48.

SEQ ID NO: 48

LRGEKMKKTRFPNKLNTLNTQRVLSKNSKRFTVTLVGVFLMIFALVTSMV
GAKTVFGLVESSTPNAINPDSSSEYRWYGYESYVRGHPYYKQFRVAHDLR
VNLEGSRSYQVYCFNLKKAFPLGSDSSVKKWYKKHDGISTKFEDYAMSPR
ITGDELNQKLRAVMYNGHPQNANGIMEGLEPLNAIRVTQEAVWYYSDNAP
ISNPDESFKRESESNLVSTSQLSLMRQALKQLIDPNLATKMPKQVPDDFQ
LSIFESEDKGDKYNKGYQNLLSGGLVPTKPPTPGDPPMPPNQPQTTSVLI
RKYAIGDYSKLLEGATLQLTGDNVNSFQARVFSSNDIGERIELSDGTYTL
TELNSPAGYSIAEPITFKVEAGKVYTIIDGKQIENPNKEIVEPYSVEAYN
DFEEFSVLTTQNYAKFYYAKNKNGSSQVVYCFNADLKSPPDSEDGGKTMT
PDFTTGEVKYTHIAGRDLFKYTVKPRDTDPDTFLKHIKKVIEKGYREKGQ
AIEYSGLTETQLRAATQLAIYYFTDSAELDKDKLKDYHGFGDMNDSTLAV
AKILVEYAQDSNPPQLTDLDFFIPNNNKYQSLIGTQWHPEDLVDIIRMED
KKEVIPVTHNLTLRKTVTGLAGDRTKDFHFEIELKNNKQELLSQTVKTDK
TNLEFKDGKATINLKHGESLTLQGLPEGYSYLVKETDSEGYKVKVNSQEV
ANATVSKTGITSDETLAFENNKEPVVPTGVDQKINGYLALIVIAGISLGI
WGIHTIRIRKHD

[1022] GAS 015 contains an amino acid motif indicative of a cell wall anchor: SEQ ID NO:182 VVPTG (shown in italics in SEQ ID NO:48, above). In some recombinant host cell systems, it may be preferable to remove this motif to facilitate secretion of a recombinant GAS 015 protein from the host cell. Alternatively, in other recombinant host cell systems, it may be preferable to use the cell wall anchor motif to anchor the recombinantly expressed protein to the cell wall. The extracellular domain of the expressed protein may be cleaved during purification or the recombinant protein may be left attached to either inactivated host cells or cell membranes in the final composition.

[1023] A pilin motif, discussed above, containing a conserved lysine (K) residue has also been identified in GAS 015. The pilin motif sequence is underlined in SEQ ID NO:48, below. Conserved lysine (K) residues are also marked in bold, at amino acid residue 243. The pilin sequence, in particular the conserved lysine residues, are thought to be important for the formation of oligomeric, pilus-like structures. Preferred fragments of GAS 015 include the conserved lysine residue. Preferably, fragments include the pilin sequence.

SEQ ID NO: 48

LRGEKMKKTRFPNKLNTLNTQRVLSKNSKRFTVTLVGVFLMIFALVTSMV
GAKTVFGLVESSTPNAINPDSSSEYRWYGYESYVRGHPYYKQFRVAHDLR
VNLEGSRSYQVYCFNLKKAFPLGSDSSVKKWYKKHDGISTKFEDYAMSPR
ITGDELNQKLRAVMYNGHPQNANGIMEGLEPLNAIRVTQEAVWYYSDNAP
ISNPDESFKRESESNLVSTSQLSLMRQALKQLIDPNLATKMPKQVPDDFQ
LSIFESEDKGDKYNKGYQNLLSGGLVPTKPPTPGDPPMPPNQPQTTSVLI
RKYAIGDYSKLLEGATLQLTGDNVNSFQARVFSSNDIGERIELSDGTYTL
TELNSPAGYSIAEPITFKVEAGKVYTIIDGKQIENPNKEIVEPYSVEAYN
DFEEFSVLTTQNYAKFYYAKNKNGSSQVVYCFNADLKSPPDSEDGGKTMT
PDFTTGEVKYTHIAGRDLFKYTVKPRDTDPDTFLKHIKKVIEKGYREKGQ
AIEYSGLTETQLRAATQLAIYYFTDSAELDKDKLKDYHGFGDMNDSTLAV
AKILVEYAQDSNPPQLTDLDFFIPNNNKYQSLIGTQWHPEDLVDIIRMED
KKEVIPVTHNLTLRKTVTGLAGDRTKDFHFEIELKNNKQELLSQTVKTDK
TNLEFKDGKATINLKHGESLTLQGLPEGYSYLVKETDSEGYKVKVNSQEV
ANATVSKTGITSDETLAFENKKEPVVPTGVDQKINGYLALIVIAGISLGI
WGIHTIRIRKHD

[1024] An E box containing a conserved glutamic residue has been identified in GAS 015. The E-box motif is underlined in SEQ ID NO:48, below. The conserved glutamic acid (E), at amino acid residue 352, is marked in bold. The E box motif, in particular the conserved glutamic acid residue, is thought to be important for the formation of oligomeric pilus-like structures of GAS 015. Preferred fragments of GAS 015 include the conserved glutamic acid residue. Preferably, fragments include the E box motif.

SEQ ID NO: 48

LRGEKMKKTRFPNKLNTLNTQRVLSKNSKRFTVTLVGVFLMIFALVTSMV
GAKTVFGLVESSTPNAINPDSSSEYRWYGYESYVRGHPYYKQFRVAHDLR
VNLEGSRSYQVYCFNLKKAFPLGSDSSVKKWYKKHDGISTKFEDYAMSPR
ITGDELNQKLRAVMYNGHPQNANGIMEGLEPLNAIRVTQEAVWYYSDNAP
ISNPDESFKRESESNLVSTSQLSLMRQALKQLIDPNLATKMPKQVPDDFQ
LSIFESEDKGDKYNKGYQNLLSGGLVPTKPPTPGDPPMPPNQPQTTSVLI
RKYAIGDYSKLLEGATLQLTGDNVNSFQARVFSSNDIGERIELSDGTYTL
TELNSPAGYSIAEPITFKVEAGKVYTIIDGKQIENPNKEIVEPYSVEAYN
DFEEFSVLTTQNYAKFYYAKNKNGSSQVVYCFNADLKSPPDSEDGGKTMT
PDFTTGEVKYTHIAGRDLFKYTVKPRDTDPDTFLKHIKKVIEKGYREKGQ
AIEYSGLTETQLRAATQLAIYYFTDSAELDKDKLKDYHGFGDMNDSTLAV
AKILVEYAQDSNPPQLTDLDFFIPNNNKYQSLIGTQWHPEDLVDIIRMED
KKEVIPVTHNLTLRKTVTGLAGDRTKDFHFEIELKNNKQELLSQTVKTDK
TNLEFKDGKATINLKHGESLTLQGLPEGYSYLVKETDSEGYKVKVNSQEV
ANATVSKTGITSDETLAFENKKEPVVPTGVDQKINGYLALIVIAGISLGI
WGIHTIRIRKHD

[1025] Spy0127 is a LepA putative signal peptidase. An example of an amino acid sequence for Spy0127 is set forth in SEQ ID NO:49.

SEQ ID NO: 49

MIIKRNDMAPSVKAGDAILFYRLSQTYKVEEAVVYEDSKTSITKVGRIIA
QAGDEVDLTEQGELKINGHIQNEGLTFIKSREANYPYRIADNSYLILNDY
YSQESENYLQDAIAKDAIKGTINTLIRLRNH

[1026] Spy0128 is thought to be a fimbrial protein. It contains a sortase substrate motif EVXTG (SEQ ID

[1027] NO:136) shown in italics in SEQ ID NO:50.

SEQ ID NO: 50

MKLRHLLLTGAALTSFAATTVHGETVVNGAKLTVTKNLDLVNSNALIPNT
DFTFKIEPDTTVNEDGNKFKGVALNTPMTKVTYTNSDKGGSNTKTAEFDF
SEVTFEKPGVYYYKVTEEKIDKVPGVSYDTTSYTVQVHVLWNEEQQKPVA
TYIVGYKEGSKVPIQFKNSLDSTTLTVKKKVSGTGGDRSKDFNFGLTLKA
NQYYKASEKVMIEKTTKGGQAPVQTEASIDQLYHFTLKDGESIKVTNLPV
GVDYVVTEDDYKSEKYTTNVEVSPQDGAVKNIAGNSTEQETSTDKDMTIT
FTNKKDFEVPTGVAMTVAPYIALGIVAVGGALYFVKKKNA

[1028] Spy0128 contains an amino acid motif indicative of a cell wall anchor: SEQ ID NO:183 EVPTG (shown in italics in SEQ ID NO:50, above). In some recombinant host cell systems, it may be preferable to remove this motif to facilitate secretion of a recombinant Spy0128 protein from the host cell. Alternatively, in other recombinant host cell systems, it may be preferable to use the cell wall anchor motif to anchor the recombinantly expressed protein to the cell wall. The extracellular domain of the expressed protein may be cleaved during purification or the recombinant protein may be left attached to either inactivated host cells or cell membranes in the final composition.

[1029] Two E boxes containing a conserved glutamic residue have been identified in Spy0128. The E-box motifs are underlined in SEQ ID NO:50, below. The conserved glutamic acid (E) residues, at amino acid residues 271 and 290, are marked in bold. The E box motifs, in particular the conserved glutamic acid residues, are thought to be important for the formation of oligomeric pilus-like structures of Spy0128. Preferred fragments of Spy0128 include at least one conserved glutamic acid residue. Preferably, fragments include at least one E box motif.

SEQ ID NO: 50

MKLRHLLLTGAALTSFAATTVHGETVVNGAKLTVTKNLDLVNSNALIPNT
DFTFKIEPDTTVNEDGNKFKGVALNTPMTKVTYTNSDKGGSNTKTAEFDF
SEVTFEKPGVYYYKVTEEKIDKVPGVSYDTTSYTVQVHVLWNEEQQKPVA
TYIVGYKEGSKVPIQFKNSLDSTTLTVKKKVSGTGGDRSKDFNFGLTLKA
NQYYKASEKVMIEKTTKGGQAPVQTEASIDQLYHFTLKDGESIKVTNLPV
GVDYVVTEDDYKSEKYTTNVEVSPQDGAVKNIAGNSTEQETSTDKDMTIT
FTNKKDFEVPTGVAMTVAPYIALGIVAVGGALYFVKKKNA

[1030] Spy0129 is a srtC1 type sortase. An example of an amino acid sequence for Spy0129 is set forth in SEQ ID NO:51.

SEQ ID NO: 51

MIVRLIKLLDKLINVIVLCFFFLCLLIAALGIYDALTVYQGANATNYQQY
KKKGVQFDDLLAINSDVMAWLTVKGTHIDIPIVQGENNLEYINKSVEGEY
SLSGSVFLDYRNKVTFEDKYSLIYAHHMAGNVMFGELPNFRKKSFFNKHK
EFSIETKTKQKLKINIFACIQTDAFDSLLFNPIDVDISSKNEFLNHIKQK
SVQYREILTTNESRFVALSTCEDMTTDGRTIVIGQIE”

[1031] Spy0130 is referred to as a hypothetical protein. It contains a sortase substrate motif LPXTG (SEQ ID NO:122), shown in italics in SEQ ID NO:52.

SEQ ID NO: 52

MKKSILRILAIGYLLMSFCLLDSVEAENLTASINIEVINQVDVATNKQSS
DIDETFMFVIEALDKESPLPNSVTTSVKGNGKTSFEQLTFSEVGQYHYKI
HQLLGKNSQYHYDETVYEVVIYVLYNEQSGALETNLVSNKLGETEKSELI
FKQEYSEKTPEPHQPDTTEKEKPQKKRNGILPSTGEMVSYVSALGIVLVA
TITLYSIYKKLKTSK

[1032] Spy0130 contains an amino acid motif indicative of a cell wall anchor: SEQ ID NO:131 LPSTG (shown in italics in SEQ ID NO:52, above). In some recombinant host cell systems, it may be preferable to remove this motif to facilitate secretion of a recombinant Spy0130 protein from the host cell. Alternatively, in other recombinant host cell systems, it may be preferable to use the cell wall anchor motif to anchor the recombinantly expressed protein to the cell wall. The extracellular domain of the expressed protein may be cleaved during purification or the recombinant protein may be left attached to either inactivated host cells or cell membranes in the final composition.

[1033] Two E boxes containing conserved glutamic residues have been identified in Spy0130. The E-box motifs are underlined in SEQ ID NO:52, below. The conserved glutamic acid (E) residues, at amino acid residues 118 and 148, are marked in bold. The E box motifs, in particular the conserved glutamic acid residues, are thought to be important for the formation of oligomeric pilus-like structures of Spy0130. Preferred fragments of Spy0130 include at least one conserved glutamic acid residue. Preferably, fragments include at least one E box motif.

SEQ ID NO: 52

MKKSILRILAIGYLLMSFCLLDSVEAENLTASINIEVINQVDVATNKQSS
DIDETFMFVIEALDKESPLPNSVTTSVKGNGKTSFEQLTFSEVGQYHYKI
HQLLGKNSQYHYDETVYEVVIYVLYNEQSGALETNLVSNKLGETEKSELI
FKQEYSEKTPEPHQPDTTEKEKPQKKRNGILPSTGEMVSYVSALGIVLVA
TITLYSIYKKLKTSK

[1034] Spy0131 is referred to as a conserved hypothetical protein. An example of an amino acid sequence of Spy0131 is set forth in SEQ ID NO:53

SEQ ID NO: 53

MTRTNYQKKRMTCPVETEDITYRRKKIKGRRQAILAQFEPELVHHELIGD
SCTCPDCHGTLTEIGSVVQRQELVFIPAQLKRINHVQHAYKCQTCSDNSL
SDKIIKAPVPKAPLAHSLGSASIIAHTVHQKFTLKVPNYRQEEDWNKLGL
SISRKEIANWHIKSSQYYFEPLYDLLRDILLSQEVIHADETSYRVLESDT
QLTYYWTFLSGKHEKKGITLYHHDKRRSGLVTQEVLGDYSGYVHCDMHGA
YRQLEHAKLVGCWAHVRRKFFEATPKQADKTSLGRKGLVYCDKLFALEAE
WCELPPQERLVKRKEILTPLMTTFFDWCREQVVLSGSKLGLAIAYSLKHE
RTFRTVLEDGHIVLSNNMAERAIKSLVMGRKNWLFSQSFEGAKAAAIIMS
LLETAKRHGLNSEKYISYLLDRLPNEETLAKREVLEAYLPWAKKVQTNCQ

[1035] Spy0133 is referred to as a conserved hypothetical protein. An example of an amino acid sequence of Spy0133 is set forth in SEQ ID NO:54.

SEQ ID NO: 54

MTIRLNDLGQVYLVCGKTDMRQGIDSLAYLVKSQHELDLFSGAVYLFCGG
RRDRFKALYWDGQGFWLLYKRFENGKLAWPRNRDEVKCLTAVQVDWLMKG
FFISPNIKISKSHDFY

[1036] Spy0135 is a SrtB type sortase. It is also referred to as a putative fimbria-associated protein. An example of an amino acid sequence of Spy0135 is set forth in SEQ ID NO:55.

SEQ ID NO: 55

MECYRDRQLLSTYHKQVTQKKPSEMEEVWQKAKAYNARLGIQPVPDAFSF
RDGIHDKNYESLLQIENNDIMGYVEVPSIKVTLPIYHYTTDEVLTKGAGH
LFGSALPVGGDGTHTVISAHRGLPSAEMFTNLNLVKKGDTFYFRVLNKVL
AYKVDQILTVEPDQVTSLSGVMGKDYATLVTCTPYGVNTKRLLVRGHRIA
YHYKKYQQAKKAMKLVDKSRMWAEVVCAAFGVVIAIILVFMYSRVSAKKS
K

[1037] GAS AI-3 Sequences

[1038] As discussed above, a GAS AI-3 sequence is present in a M3, M18 and M5 strain isolates. Examples of GAS AI-3 sequences from M3 strain isolate MGAS315 are set forth below.

[1039] SpyM30097 is as a negative transcriptional regulator (Nra). An example of an amino acid sequence of SpyM30097 is set forth in SEQ ID NO:56.

SEQ ID NO: 56

MPYVKKKKDSFLVETYLEQSIRDKSELVLLLFKSPTIIFSHVAKQTGLTA
VQLKYYCKELDDFFGNNLDITIKKGKIICCFVKPVKEFYLHQLYDTSTIL
KLLVFFIKNGTSSQPLIKFSKKYFLSSSSAYRLRESLIKLLREFGLRVSK
NTIVGEEYRIRYLIAMLYSKFGIVIYPLDHLDNQIIYRFLSQSATNLRTS
PWLEEPFSFYNMLLALSWKRHQFAVSIPQTRIFRQLKKLFIYDCLTRSSR
QVIENAFSLTFSQGDLEYLFLIYITTNNSFASLQWTPQHIETCCHIFEKN
DTFRLLLEPILKRLPQLNHSKQDLIKALMYFSKSFLFNLQHFVIEIPSFS
LPTYTGNSNLYKALKNIVNQWLAQLPGKRHLNEKHLQLFCSHIEQILKNK
QPALTVVLISSNFINAKLLTDTIPRYFSDKGIHFYSFYLLRDDIYQIPSL
KPDLVITHSRLIPFVKNDLVKGVTVAEFSFDNPDYSIASIQNLIYQLKDK
KYQDFLNEQLQ

[1040] SpyM30098 is thought to be a collagen binding protein (Cpb). It contains a sortase substrate motif VPXTG (SEQ ID NO:137) shown in italics in SEQ ID NO:57.

SEQ ID NO: 57

MQKRDKTNYGSANNKRRQTTIGLLKVFLTFVALIGIVGFSIRAFGAEEQS
VPNKQSSVQDYPWYGYDSYSKGYPDYSPLKTYHNLKVNLDGSKEYQAYCF
NLTKHFPSKSDSVRSQWYKKLEGTNENFIKLADKPRIEDGQLQQNILRIL
YNGYPNDRNGIMKGIDPLNAILVTQNAIWYYTDSSYISDTSKAFQQEETD
LKLDSQQLQLMRNALKRLINPKEVESLPNQVPANYQLSIFQSSDKTFQNL
LSAEYVPDTPPKPGEEPPAKTEKTSVIIRKYAEGDYSKLLEGATLKLAQI
EGSGFQEKIFDSNKSGEKVELPNGTYVLSELKPPQGYGVATPITFKVAAE
KVLIKNKEGQFVENQNKEIAEPYSVTAFNDFEEIGYLSDFNNYGKFYYAK
NTNGTNQVVYCFNADLHSPPDSYDHGANIDPDVSESKEIKYTHVSGYDLY
KYAATPRDKDADFFLKHIKKILDKGYKKKGDTYKTLTEAQFRAATQLAIY
YYTDSADLTTLKTYNDNKGYHGFDKLDDATLAVVHELITYAEDVTLPMTQ
NLDFFVPNSSRYQALIGTQYHPNELIDVISMEDKQAPIIPITHKLTISKT
VTGTIADKKKEFNFEIHLKSSDGQAISGTYPTNSGELTVTDGKATFTLKD
GESLIVEGLPSGYSYEITETGASDYEVSVNGKNAPDGKATKASVKEDETV
AFENRKDLVPPTGLTTDGAIYLWLLLLVPFGLLVWLFGRKGTKK

[1041] SpyM30098 contains an amino acid motif indicative of a cell wall anchor: SEQ ID NO:184 VPPTG (shown in italics in SEQ ID NO:57, above). In some recombinant host cell systems, it may be preferable to remove this motif to facilitate secretion of a recombinant SpyM30098 protein from the host cell. Alternatively, in other recombinant host cell systems, it may be preferable to use the cell wall anchor motif to anchor the recombinantly expressed protein to the cell wall. The extracellular domain of the expressed protein may be cleaved during purification or the recombinant protein may be left attached to either inactivated host cells or cell membranes in the final composition.

[1042] A pilin motif, discussed above, containing a conserved lysine (K) residue has also been identified in SpyM30098. The pilin motif sequence is underlined in SEQ ID NO:57, below. Conserved lysine (K) residues are also marked in bold, at amino acid residues 262 and 270. The pilin sequence, in particular the conserved lysine residues, are thought to be important for the formation of oligomeric, pilus-like structures. Preferred fragments of SpyM30098 include at least one conserved lysine residue. Preferably, fragments include the pilin sequence.

SEQ ID NO: 57

MQKRDKTNYGSANNKRRQTTIGLLKVFLTFVALIGIVGFSIRAFGAEEQS
VPNKQSSVQDYPWYGYDSYSKGYPDYSPLKTYHNLKVNLDGSKEYQAYCF
NLTKHFPSKSDSVRSQWYKKLEGTNENFIKLADKPRIEDGQLQQNILRIL
YNGYPNDRNGIMKGIDPLNAILVTQNAIWYYTDSSYISDTSKAFQQEETD
LKLDSQQLQLMRNALKRLINPKEVESLPNQVPANYQLSIFQSSDKTFQNL
LSAEYVPDTPPKPGEEPPAKTEKTSVIIRKYAEGDYSKLLEGATLKLAQI
EGSGFQEKIFDSNKSGEKVELPNGTYVLSELKPPQGYGVATPITFKVAAE
KVLIKNKEGQFVENQNKEIAEPYSVTAFNDFEEIGYLSDFNNYGKFYYAK
NTNGTNQVVYCFNADLHSPPDSYDHGANIDPDVSESKEIKYTHVSGYDLY
KYAATPRDKDADFFLKHIKKILDKGYKKKGDTYKTLTEAQFRAATQLAIY
YYTDSADLTTLKTYNDNKGYHGFDKLDDATLAVVHELITYAEDVTLPMTQ
NLDFFVPNSSRYQALIGTQYHPNELIDVISMEDKQAPIIPITHKLTISKT
VTGTIADKKKEFNFEIHLKSSDGQAISGTYPTNSGELTVTDGKATFTLKD
GESLIVEGLPSGYSYEITETGASDYEVSVNGKNAPDGKATKASVKEDETV
AFENRKDLVPPTGLTTDGAIYLWLLLLVPFGLLVWLFGRKGTKK

[1043] An E box containing a conserved glutamic residue has been identified in SpyM30098. The E-box motif is underlined in SEQ ID NO:57, below. The conserved glutamic acid (E), at amino acid residue 330, is marked in bold. The E box motif, in particular the conserved glutamic acid residue, is thought to be important for the formation of oligomeric pilus-like structures of SpyM30098. Preferred fragments of SpyM30098 include the conserved glutamic acid residue. Preferably, fragments include the E box motif.

SEQ ID NO: 57

MQKRDKTNYGSANNKRRQTTIGLLKVFLTFVALIGIVGFSIRAFGAEEQS
VPNKQSSVQDYPWYGYDSYSKGYPDYSPLKTYHNLKVNLDGSKEYQAYCF
NLTKHFPSKSDSVRSQWYKKLEGTNENFIKLADKPRIEDGQLQQNILRIL
YNGYPNDRNGIMKGIDPLNAILVTQNAIWYYTDSSYISDTSKAFQQEETD
LKLDSQQLQLMRNALKRLINPKEVESLPNQVPANYQLSIFQSSDKTFQNL
LSAEYVPDTPPKPGEEPPAKTEKTSVIIRKYAEGDYSKLLEGATLKLAQI
EGSGFQEKIFDSNKSGEKVELPNGTYVLSELKPPQGYGVATPITFKVAAE
KVLIKNKEGQFVENQNKEIAEPYSVTAFNDFEEIGYLSDFNNYGKFYYAK
NTNGTNQVVYCFNADLHSPPDSYDHGANIDPDVSESKEIKYTHVSGYDLY
KYAATPRDKDADFFLKHIKKILDKGYKKKGDTYKTLTEAQFRAATQLAIY
YYTDSADLTTLKTYNDNKGYHGFDKLDDATLAVVHELITYAEDVTLPMTQ
NLDFFVPNSSRYQALIGTQYHPNELIDVISMEDKQAPIIPITHKLTISKT
VTGTIADKKKEFNFEIHLKSSDGQAISGTYPTNSGELTVTDGKATFTLKD
GESLIVEGLPSGYSYEITETGASDYEVSVNGKNAPDGKATKASVKEDETV
AFENRKDLVPPTGLTTDGAIYLWLLLLVPFGLLVWLFGRKGTKK

[1044] SpyM30099 is referred to as LepA. An example of an amino acid sequence of SpyM30099 is set forth in SEQ ID NO:58.

SEQ ID NO: 58

MTNYLNRLNENPLLKAFIRLVLKISIIGFLGYILFQYVFGVMIVNTNQMS
PAVSAGDGVLYYRLTDRYHINDVVVYEVDDTLKVGRIAAQAGDEVNFTQE
GGLLINGHPPEKEVPYLTYPHSSGPNFPYKVPTGTYFTLNDYREERLDSR
YYGALPINQIKGKISTLLRVRGI

[1045] SpyM30100 is thought to be a fimbrial protein. An example of an amino acid sequence of SpyM30100 is set forth in SEQ ID NO:59.

SEQ ID NO: 59

MKKNKLLLATAILATALGTASLNQNVKAETAGVSENAKLIVKKTFDSYTD
NEVLMPKADYTFKVEADSTASGKTKDGLEIKPGIVNGLTEQIISYTNTDK
PDSKVKSTEFDFSKVVFPGIGVYRYTVSEKQGDVEGITYDTKKWTVDVYV
GNKEGGGFEPKFIVSKEQGTDVKKPVNFNNSFATTSLKVKKNVSGNTGEL
QKEFDFTLTLNESTNFKKDQIVSLQKGNEKFEVKIGTPYKFKLKNGESIQ
LDKLPVGITYKVNEMEANKDGYKTTASLKEGDGQSKMYQLDMEQKTDESA
DEIVVTNKRDTQVPTGVVGTLAPFAVLSIVAIGGVIYITKRKKA

[1046] SpyM30100 contains an amino acid motif indicative of a cell wall anchor: SEQ ID NO:140 QVPTG (shown in italics in SEQ ID NO:59, above). In some recombinant host cell systems, it may be preferable to remove this motif to facilitate secretion of a recombinant SpyM30100 protein from the host cell. Alternatively, in other recombinant host cell systems, it may be preferable to use the cell wall anchor motif to anchor the recombinantly expressed protein to the cell wall. The extracellular domain of the expressed protein may be cleaved during purification or the recombinant protein may be left attached to either inactivated host cells or cell membranes in the final composition.

[1047] Two pilin motifs, discussed above, containing conserved lysine (K) residues have also been identified in SpyM30100. The pilin motif sequences are underlined in SEQ ID NO:59, below. Conserved lysine (K) residues are also marked in bold, at amino acid residues 57 and 63 and at amino acid residues 161 and 166. The pilin sequences, in particular the conserved lysine residues, are thought to be important for the formation of oligomeric, pilus-like structures. Preferred fragments of SpyM30100 include at least one conserved lysine residue. Preferably, fragments include at least one pilin sequence.

SEQ ID NO: 59

MKKNKLLLATAILATALGTASLNQNVKAETAGVSENAKLIVKKTFDSYTD
NEVLMPKADYTFKVEADSTASGKTKDGLEIKPGIVNGLTEQIISYTNTDK
PDSKVKSTEFDFSKVVFPGIGVYRYTVSEKQGDVEGITYDTKKWTVDVYV
GNKEGGGFEPKFIVSKEQGTDVKKPVNFNNSFATTSLKVKKNVSGNTGEL
QKEFDFTLTLNESTNFKKDQIVSLQKGNEKFEVKIGTPYKFKLKNGESIQ
LDKLPVGITYKVNEMEANKDGYKTTASLKEGDGQSKMYQLDMEQKTDESA
DEIVVTNKRDTQVPTGVVGTLAPFAVLSIVAIGGVIYITKRKKA

[1048] Two E boxes, each containing a conserved glutamic residue, have been identified in SpyM30100. The E-box motifs are underlined in SEQ ID NO:59, below. The conserved glutamic acid (E) residues, at amino acid residues 232 and 264, are marked in bold. The E box motifs, in particular the conserved glutamic acid residues, are thought to be important for the formation of oligomeric pilus-like structures of SpyM30100. Preferred fragments of SpyM30100 include at least one conserved glutamic acid residue. Preferably, fragments include at least one E box motif.

SEQ ID NO: 59

MKKNKLLLATAILATALGTASLNQNVKAETAGVSENAKLIVKKTFDSYTD
NEVLMPKADYTFKVEADSTASGKTKDGLEIKPGIVNGLTEQIISYTNTDK
PDSKVKSTEFDFSKVVFPGTGVYRYTVSEKQGDVEGITYDTKKWTVDVYV
GNKEGGGFEPKFIVSKEQGTDVKKPVNFNNSFATTSLKVKKNVSGNTGEL
QKEFDFTLTLNESTNFKKDQIVSLQKGNEKFEVKIGTPYKFKLKNGESIQ
LDKLPVGITYKVNEMEANKDGYKTTASLKEGDGQSKMYQLDMEQKTDESA
DEIVVTNKRDTQVPTGVVGTLAPFAVLSIVAIGGVIYITKRKKA

[1049] SpyM30101 is a SrtC2 type sortase. An example of an amino acid sequence of SpyM30101 is set forth in SEQ ID NO:60.

SEQ ID NO: 60

MTIVQVINKAIDTLILIFCLVVLFLAGFGLWDSYHLYQQADASNFKKFKT
AQQQPKFEDLLALNEDVIGWLNIPGTHIDYPLVQGKTNLEYINKAVDGSV
AMSGSLFLDTRNHNDFTDDYSLIYGHHMAGNAMFGEIPKFLKKDFFSKHN
KAIIETKERKKLTVTIFACLKTDAFNQLVFNPNAITNQDQQRQLVDYISK
RSKQFKPVKLKHHTKFVAFSTCENFSTDNRVIVVGTIQE

[1050] SpyM30102 is referred to as a hypothetical protein. An example of an amino acid sequence of SpyM30102 is set forth in SEQ ID NO:61.

SEQ ID NO: 61

MILTMLAFNQTVLAKDSTVQTSISVENVLERAGDSTPFSIALESIDAMKT
IEEITIAGSGKASFSPLTFTTVGQYTYRVYQKPSQNKDYQADTTVFDVLV
YVTYDEDGTLVAKVISRRAGDEEKSAITFKPKWLVKPIPPRQPNIPKTPL
PLAGEVKSLLGILSIVLLGLLVLLYVKKLKSRL

[1051] SpyM30102 contains an amino acid motif indicative of a cell wall anchor: SEQ ID NO:185 LPLAG (shown in italics in SEQ ID NO:61, above). In some recombinant host cell systems, it may be preferable to remove this motif to facilitate secretion of a recombinant SpyM30102 protein from the host cell. Alternatively, in other recombinant host cell systems, it may be preferable to use the cell wall anchor motif to anchor the recombinantly expressed protein to the cell wall. The extracellular domain of the expressed protein may be cleaved during purification or the recombinant protein may be left attached to either inactivated host cells or cell membranes in the final composition.

[1052] A pilin motif, discussed above, containing a conserved lysine (K) residue has also been identified in SpyM30102. The pilin motif sequence is underlined in SEQ ID NO:61, below. The conserved lysine (K) residue is also marked in bold, at amino acid residue 132. The pilin sequence, in particular the conserved lysine residues, are thought to be important for the formation of oligomeric, pilus-like structures. Preferred fragments of SpyM30102 include the conserved lysine residue. Preferably, fragments include the pilin sequence.

SEQ ID NO: 61

MILTMLAFNQTVLAKDSTVQTSISVENVLERAGDSTPFSIALESIDAMKT
IEEITIAGSGKASFSPLTFTTVGQYTYRVYQKPSQNKDYQADTTVFDVLV
YVTYDEDGTLVAKVISRRAGDEEKSAITFKPKWLVKPIPPRQPNIPKTPL
PLAGEVKSLLGILSIVLLGLLVLLYVKKLKSRL

[1053] Two E boxes containing conserved glutamic residues have been identified in SpyM30102. The E-box motifs are underlined in SEQ ID NO:61, below. The conserved glutamic acid (E) residues, at amino acid residues 52 and 122, are marked in bold. The E box motifs, in particular the conserved glutamic acid residues, are thought to be important for the formation of oligomeric pilus-like structures of SpyM30102. Preferred fragments of SpyM30102 include at least one conserved lysine residue. Preferably, fragments include at least one pilin sequence.

SEQ ID NO: 61

MILTMLAFNQTVLAKDSTVQTSISVENVLERAGDSTPFSIALESIDAMKT
IEEITIAGSGKASFSPLTFTTVGQYTYRVYQKPSQNKDYQADTTVFDVLV
YVTYDEDGTLVAKVISRRAGDEEKSAITFKPKWLVKPIPPRQPNIPKTPL
PLAGEVKSLLGILSIVLLGLLVLLYVKKLKSRL

[1054] SpyM30103 is referred to as a putative multiple sugar metabolism regulator. An example of an amino acid sequence for SpyM3103 is set forth in SEQ ID NO:62.

SEQ ID NO: 62

MVRFDLKHVQTLHSLSQLPISVMSQDKALIQVYGNDDYLLCYYQFLKHLA
IPQAAQDVIFYEGLFEESFMIFPLCHYIIAIGPFYPYSLNKDYQEQLANN
CLKHSSHRSKEELLSYMALVPHFPINNVRNLLIAIDAFFDTQFETTCQQT
IHQLLQHSKQMTADPDIIHRLKHISKASSQLPPVLEHLNHIMDLVKLGNP
QLLKQEINRIPLSSITSSSISALRAEKNLTVIYLTRLLEFSFVENTDVAK
HYSLVKYYMALNEEASDLLKVLRIRCAAIIHFSESLTNKSISDKRQMYNS
VLHYVDSHLYSKLKVSDIAKRLYVSESHLRSVFKKYSNVSLQHYILSTKI
KEAQLLLKRGIPVGEVAKSLYFYDTTHFHKIFKKYTGISSKDYLAKYRDN
I

[1055] SpyM30104 is thought to be a F2 like fibronectin binding protein. An example of an amino acid sequence for SpyM30104 is set forth in SEQ ID NO:63.

SEQ ID NO: 63

MSSSDEETLKQYASKYTSNRRGDTSGNLKKQIAKVLTEGYPTNKSDWLNG
LTENEKIEVTQDAIWYFTETTVPADRSYTNRNVNSQKMKEVYQKLIDTTD
IDKYEDVQFDLFVPQDTNLQAVISVEPVIESLPWTSLKPIAQKDITAKKI
WVDAPKEKPIIYFKLYRQLPGEKEVAVDDAELKQINSEGQQEISVTWTNQ
LVTDEKGMAYIYSVKEVDKNGELLEPKDYIKKEDGLTVTNTYVKPTSGHY
DIEVTFGNGHIDITEDTTPDIVSGENQMKQIEGEDSKPIDEVTENNLIEF
GKNTMPGEEDGTNSNKYEEVEDSRPVDTLSGLSSEQGQSGDMTIEEDSAT
HIKFSKRDIDGKELAGATMELRDSSGKTISTWISDGQVKDFYLMPGKYTF
VETAAPDGYEVATAITFTVNEQGQVTVNGKATKGDAHIVMVDAYKPTKGS
GQVIDIEEKLPDEQGHSGSTTEIEDSKSSDVIIGGQGEVVDTTEDTQSGM
TGHSGSTTEIEDSKSSDVIIGGQGEVVDTTEDTQSGMTGHSGSTTKIEDS
KSSDVIVGGQGQIVETTEDTQTGMHGDSGRKTEVEDTKLVQSFHFDNKEP
ESNSEIPKKDKSKSNTSLPATGEKQHNKFFWMVTSCSLISSVFVISLKSK
KRLSSC

[1056] SpyM30104 contains an amino acid motif indicative of a cell wall anchor: SEQ ID NO:180 LPATG (shown in italics in SEQ ID NO:63, above). In some recombinant host cell systems, it may be preferable to remove this motif to facilitate secretion of a recombinant SpyM30104 protein from the host cell. Alternatively, in other recombinant host cell systems, it may be preferable to use the cell wall anchor motif to anchor the recombinantly expressed protein to the cell wall. The extracellular domain of the expressed protein may be cleaved during purification or the recombinant protein may be left attached to either inactivated host cells or cell membranes in the final composition.

[1057] Two pilin motifs, discussed above, containing conserved lysine (K) residues have also been identified in SpyM30104. The pilin motif sequences are underlined in SEQ ID NO:63, below. Conserved lysine (K) residues are also marked in bold, at amino acid residues 156 and 227. The pilin sequences, in particular the conserved lysine residues, are thought to be important for the formation of oligomeric, pilus-like structures. Preferred fragments of SpyM30104 include at least one conserved lysine residue. Preferably, fragments include at least one pilin sequence.

SEQ ID NO: 63

MSSSDEETLKQYASKYTSNRRGDTSGNLKKQIAKVLTEGYPTNKSDWLNG
LTENEKIEVTQDAIWYFTETTVPADRSYTNRNVNSQKMKEVYQKLIDTTD
IDKYEDVQFDLFVPQDTNLQAVISVEPVIESLPWTSLKPIAQKDITAKKI
WVDAPKEKPIIYFKLYRQLPGEKEVAVDDAELKQINSEGQQEISVTWTNQ
LVTDEKGMAYIYSVKEVDKNGELLEPKDYIKKEDGLTVTNTYVKPTSGHY
DIEVTFGNGHIDITEDTTPDIVSGENQMKQIEGEDSKPIDEVTENNLIEF
GKNTMPGEEDGTNSNKYEEVEDSRPVDTLSGLSSEQGQSGDMTIEEDSAT
HIKFSKRDIDGKELAGATMELRDSSGKTISTWISDGQVKDFYLMPGKYTF
VETAAPDGYEVATAITFTVNEQGQVTVNGKATKGDAHIVMVDAYKPTKGS
GQVIDIEEKLPDEQGHSGSTTEIEDSKSSDVIIGGQGEVVDTTEDTQSGM
TGHSGSTTEIEDSKSSDVIIGGQGEVVDTTEDTQSGMTGHSGSTTKIEDS
KSSDVIVGGQGQIVETTEDTQTGMHGDSGRKTEVEDTKLVQSFHFDNKEP
ESNSEIPKKDKSKSNTSLPATGEKQHNKFFWMVTSCSLISSVFVISLKSK
KRLSSC

[1058] An E box containing a conserved glutamic residue has been identified in SpyM30104. The E-box motif is underlined in SEQ ID NO:63, below. The conserved glutamic acid (E), at amino acid residue 402, is marked in bold. The E box motif, in particular the conserved glutamic acid residue, is thought to be important for the formation of oligomeric pilus-like structures of SpyM30104. Preferred fragments of SpyM30104 include the conserved glutamic acid residue. Preferably, fragments include the E box motif.

SEQ ID NO: 63

MSSSDEETLKQYASKYTSNRRGDTSGNLKKQIAKVLTEGYPTNKSDWLNG
LTENEKIEVTQDAIWYFTETTVPADRSYTNRNVNSQKMKEVYQKLIDTTD
IDKYEDVQFDLFVPQDTNLQAVISVEPVIESLPWTSLKPIAQKDITAKKI
WVDAPKEKPIIYFKLYRQLPGEKEVAVDDAELKQINSEGQQEISVTWTNQ
LVTDEKGMAYIYSVKEVDKNGELLEPKDYIKKEDGLTVTNTYVKPTSGHY
DIEVTFGNGHIDITEDTTPDIVSGENQMKQIEGEDSKPIDEVTENNLIEF
GKNTMPGEEDGTNSNKYEEVEDSRPVDTLSGLSSEQGQSGDMTIEEDSAT
HIKFSKRDIDGKELAGATMELRDSSGKTISTWISDGQVKDFYLMPGKYTF
VETAAPDGYEVATAITFTVNEQGQVTVNGKATKGDAHIVMVDAYKPTKGS
GQVIDIEEKLPDEQGHSGSTTEIEDSKSSDVIIGGQGEVVDTTEDTQSGM
TGHSGSTTEIEDSKSSDVIIGGQGEVVDTTEDTQSGMTGHSGSTTKIEDS
KSSDVIVGGQGQIVETTEDTQTGMHGDSGRKTEVEDTKLVQSFHFDNKEP
ESNSEIPKKDKSKSNTSLPATGEKQHNKFFWMVTSCSLISSVFVISLKSK
KRLSSC

[1059] Examples of GAS AI-3 sequences from M3 strain isolate SSI-1 are set forth below.

[1060] Sps0099 is a negative transcriptional regulator (Nra). An example of an amino acid sequence for Sps0099 is set forth in SEQ ID NO:64.

SEQ ID NO: 64

MPYVKKKKDSFLVETYLEQSIRDKSELVLLLFKSPTIIFSHVAKQTGLTA
VQLKYYCKELDDFFGNNLDITIKKGKIICCFVKPVKEFYLHQLYDTSTIL
KLLVFFIKNGTSSQPLIKFSKKYFLSSSSAYRLRESLIKLLREFGLRVSK
NTIVGEEYRIRYLIAMLYSKFGIVIYPLDHLDNQIIYRFLSQSATNLRTS
PWLEEPFSFYNMLLALSWKRHQFAVSIPQTRIFRQLKKLFIYDCLTRSSR
QVIENAFSLTFSQGDLEYLFLIYITTNNSFASLQWTPQHIETCCHIFEKN
DTFRLLLEPILKRLPQLNHSKQDLIKALMYFSKSFLFNLQHFVIEIPSFS
LPTYTGNSNLYKALKNIVNQWLAQLPGKRHLNEKHLQLFCSHIEQILKNK
QPALTVVLISSNFINAKLLTDTIPRYFSDKGIHFYSFYLLRDDIYQIPSL
KPDLVITHSRLIPFVKNDLVKGVTVAEFSFDNPDYSIASIQNLIYQLKDK
KYQDFLNEQLQ

[1061] Sps0100 is thought to be a collagen binding protein (Cbp). It contains a sortase substrate motif VPXTG shown in italics in SEQ ID NO:65.

SEQ ID NO: 65

MQKRDKTNYGSANNKRRQTTIGLLKVFLTFVALIGIVGFSIRAFGAEEQS
VPNKQSSVQDYPWYGYDSYSKGYPDYSPLKTYHNLKVNLDGSKEYQAYCF
NLTKHFPSKSDSVRSQWYKKLEGTNENFIKLADKPRIEDGQLQQNILRIL
YNGYPNDRNGIMKGIDPLNAILVTQNAIWYYTDSSYISDTSKAFQQEETD
LKLDSQQLQLMRNALKRLINPKEVESLPNQVPANYQLSIFQSSDKTFQNL
LSAEYVPDTPPKPGEEPPAKTEKTSVIIRKYAEGDYSKLLEGATLKLAQI
EGSGFQEKIFDSNKSGEKVELPNGTYVLSELKPPQGYGVATPITFKVAAE
KVLIKNKEGQFVENQNKEIAEPYSVTAFNDFEEIGYLSDFNNYGKFYYAK
NTNGTNQVVYCFNADLHSPPDSYDHGANIDPDVSESKEIKYTHVSGYDLY
KYAATPRDKDADFFLKHIKKILDKGYKKKGDTYKTLTEAQFRAATQLAIY
YYTDSADLTTLKTYNDNKGYHGFDKLDDATLAVVHELITYAEDVTLPMTQ
NLDFFVPNSSRYQALIGTQYHPNELIDVISMEDKQAPIIPITHKLTISKT
VTGTIADKKKEFNFEIHLKSSDGQAISGTYPTNSGELTVTDGKATFTLKD
GESLIVEGLPSGYSYEITETGASDYEVSVNGKNAPDGKATKASVKEDETV
AFENRKDLVPPTGLTTDGAIYLWLLLLVPFGLLVWLFGRKGTKK

[1062] Sps0101 is referred to as a LepA protein. An example of an amino acid sequence of Sps0101 is set forth as SEQ ID NO: 66

SEQ ID NO: 66

MTNYLNRLNENPLLKAFIRLVLKISIIGFLGYILFQYVFGVMIVNTNQMS
PAVSAGDGVLYYRLTDRYHINDVVVYEVDDTLKVGRIAAQAGDEVNFTQE
GGLLINGHPPEKEVPYLTYPHSSGPNFPYKVPTGTYFILNDYREERLDSR
YYGALPINQIKGKISTLLRVRGI

[1063] Sps0102 is thought to be a fimbrial protein. It contains a sortase substrate motif QVXTG shown in italics in SEQ ID NO:67.

SEQ ID NO: 67

MEREKMKKNKLLLATAILATALGTASLNQNVKAETAGVSENAKLIVKKTF
DSYTDNEVLMPKADYTFKVEADSTASGKTKDGLEIKPGIVNGLTEQIISY
TNTDKPDSKVKSTEFDFSKVVFPGIGVYRYTVSEKQGDVEGITYDTKKWT
VDVYVGNKEGGGFEPKFIVSKEQGTDVKKPVNFNNSFATTSLKVKKNVSG
NTGELQKEFDFTLTLNESTNFKKDQIVSLQKGNEKFEVKIGTPYKFKLKN
GESIQLDKLPVGITYKVNEMEANKDGYKTTASLKEGDGQSKMYQLDMEQK
TDESADEIVVTNKRDTQVPTGVVGTLAPFAVLSIVAIGGVIYITKRKKA

[1064] Sps0103 is a SrtC2 type sortase. An example of Sps0103 is set forth in SEQ ID NO:68.

SEQ ID NO: 68

MVMTIVQVINKAIDTLILIFCLVVLFLAGFGLWDSYHLYQQADASNFKKF
KTAQQQPKFEDLLALNEDVIGWLNIPGTHIDYPLVQGKTNLEYINKAVDG
SVAMSGSLFLDTRNHNDFTDDYSLIYGHHMAGNAMFGEIPKFLKKDFFSK
HNKAIIETKERKKLTVTIFACLKTDAFNQLVFNPNAITNQDQQRQLVDYI
SKRSKQFKPVKLKHHTKFVAFSTCENFSTDNRVIVVGTIQE

[1065] Sps0104 is referred to as a hypothetical protein. It contains a sortase substrate motif LPXAG shown in italics in SEQ ID NO:69.

SEQ ID NO: 69

MLFSVVMILTMLAFNQTVLAKDSTVQTSISVENVLEPAGDSTPFSIALES
IDAMKTIEEITIAGSGKASFSPLTFTTVGQYTYRVYQKPSQNKDYQADTT
VFDVLVYVTYDEDGTLVAKVISRRAGDEEKSAITFKPKWLVKPIPPRQPN
IPKTPLPLAGEVKSLLGILSIVLLGLLVLLYVKKLKSRL

[1066] Sps0105 is referred to as a putative multiple sugar metabolism regulator. An example of Sps0105 is set forth in SEQ ID NO:70.

SEQ ID NO: 70

MALVPHFPINNVRNLLIAIDAFFDTQFETTCQQTIHQLLQHSKQMTADPD
IIHRLKHISKASSQLPPVLEHLNHIMDLVKLGNPQLLKQEINRIPLSSIT
SSSISALRAEKNLTVIYLTRLLEFSFVENTDVAKHYSLVKYYMALNEEAS
DLLKVLRIRCAAIIHFSESLTNKSISDKRQMYNSVLHYVDSHLYSKLKVS
DIAKRLYVSESHLRSVFKKYSNVSLQHYILSTKIKEAQLLLKRGIPVGEV
AKSLYFYDTTHFHKIFKKYTGISSKDYLAKYRDNI

[1067] Sps0106 is thought to be a F2 like fibronectin binding protein. It contains a sortase substrate LPXTG (SEQ ID NO:122) shown in italics in SEQ ID NO:71.

SEQ ID NO: 71

MTQKNSYKLSFLLSLTGFILGLLLVFIGLSGVSVGHAETRNGANKQGAFE
IKKNKSQEEYNYEVYDNRNILQDGEHKLEIKRVDGTGKTYQGFCFQLTKN
FPTAQGVSKKLYKKLSSSDEETLKQYASKYTSNRRGDTSGNLKKQIAKVL
TEGYPTNKSDWLNGLTENEKIEVTQDAIWYFTETTVPADRSYTNRNVNSQ
KMKEVYQKLIDTTDIDKYEDVQFDLFVPQDTNLQAVISVEPVIESLPWTS
LKPIAQKDITAKKIWVDAPKEKPIIYFKLYRQLPGEKEVAVDDAELKQIN
SEGQQEISVTWTNQLVTDEKOMAYIYSVKEVDKNGELLEPKDYIKKEDGL
TVTNTYVKPTSGHYDIEVTFGNGHIDITEDTTPDIVSGENQMKQIEGEDS
KPIDEVTENNLIEFGKNTMPGEEDGTNSNKYEEVEDSRPVDTLSGLSSEQ
GQSGDMTIEEDSATHIKFSKRDIDGKELAGATMELRDSSGKTISTWISDG
QVKDFYLMPGKYTFVETAAPDGYEVATAITFTVNEQGQVTVNGKATKGDA
HIVMVDAYKPTKGSGQVIDIEEKLPDEQGHSGSTTEIEDSKSSDVIIGGQ
GEVVDTTEDTQSGMTGHSGSTTKIEDSKSSDVIVGGQGQIVETTEDTQTG
MHGDSGRKTEVEDTKLVQSFHFDNKEPESNSEIPKKDKSKSNTSLPATGE
KQHNKFFWMVTSCSLISSVFVISLKSKKRLSSC

[1068] Examples of GAS AI-3 sequences from M5 isolate Manfredo are set forth below.

[1069] Orf 77 encodes a negative transcription regulator (Nra). An example of the nucleotide sequence encoding Nra (SEQ ID NO:88) and an Nra amino acid sequence (SEQ ID NO:89) are set forth below.

SEQ ID NO: 88

ATGCCTTATGTCAAAAAGAAAAAGGATAGTTTCTTAGTAGAAACATATCT
TGAACAGTCTATTAGAGATAAAAGTGAATTAGTCTTACTGTTATTTAAAT
CGCCTACTATCATTTTTTCTCATGTTGCTAAACAAACTGGTCTGACGGCT
GTACAATTAAAATATTACTGTAAAGAACTTGATGACTTTTTTGGAAATAA
TTTAGACATTACCATTAAAAAGGGCAAAATAATATGTTGTTTTGTCAAAC
CTGTTAAGGAATTCTACCTTCATCAACTCTATGACACATCAACAATATTA
AAATTATTAGTTTTCTTTATTAAAAATGGAACGTCATCACAACCTCTGAT
TAAATTTTCAAAAAAGTATTTTCTATCAAGCTCCTCAGCTTATCGACTAC
GGGAATCGCTGATCAAATTACTACGGGAATTTGGCTTGAGAGTCTCAAAA
AATACAATTGTCGGAGAGGAATATCGTATTCGCTATCTTATTGCCATGCT
ATATAGTAAATTTGGCATTGTCATCTATCCGTTAGATCATCTAGACAATC
AAATTATTTATCGCTTCTTATCACAAAGTGCAACCAATTTAAGAACATCG
CCCTGGCTAGAGGAACCTTTTTCTTTTTATAATATGTTACTTGCCTTGTC
ATGGAAACGTCACCAATTTGCAGTTAGCATTCCTCAAACACGTATTTTTC
GACAATTAAAAAAGCTTTTTATCTATGATTGTTTAACTCGAAGCAGTCGA
CAAGTAATCGAAAATGCTTTTTCGTTAATGTTCTCACAAGGAGATCTCGA
TTATCTTTTTTTAATTTATATTACCACCAATAATTCCTTTGCCAGCCTAC
AATGGACTCCACAGCATATTGAAACTTGCTGCCATATTTTTGAAAAAAAT
GACACATTTCGGTTATTGTTAGAGCCCATTCTTAAACGTTTACCGCAATT
AAACCATTCTAAACAAGACCTTATTAAAGCCCTTATGTATTTTTCAAAAT
CTTTTCTATTTAACCTCCAACATTTCGTCATCGAGATTCCTTCTTTTTCC
TTGCCGACCTATACAGGCAACTCTAATCTTTACAAAGCTTTAAAAAATAT
TGTAAATCAGTGGCTTGCTCAATTACCCGGAAAGCGTCATCTTAACGAAA
AGCATCTCCAACTTTTTTGCTCTCATATTGAACAAATCTTAAAAAATAAA
CAACCTGCTTTAACTGTCGTTTTAATATCTAGTAACTTTATAAATGCTAA
ACTCCTTACAGATACTATCCCACGATATTTTTCTGATAAAGGAATTCATT
TTTATTCTTTTTACTTATTAAGAGATGATATCTATCAAATTCCAAGCTTA
AAACCAGATTTAGTTATCACTCATAGCCGATTAATTCCTTTTGTTAAGAA
TGATCTGGTCAAAGGTGTTACTGTTGCTGAATTTTCTTTTGATAACCCTG
ACTACTCTATTGCTTCAATTCAAAACTTGATATATCAGCTCAAAGATAAA
AAATATCAAGATTTTCTAAACGAGCAATTACAA

SEQ ID NO: 89

MPYVKKKKDSFLVETYLEQSIRDKSELVLLLFKSPTIIFSHVAKQTGLTA
VQLKYYCKELDDFFGNNLDITIKKGKIICCFVKPVKEFYLHQLYDTSTIL
KLLVFFIKNGTSSQPLIKFSKKYFLSSSSAYRLRESLIKLLREFGLRVSK
NTIVGEEYRIRYLIAMLYSKFGIVIYPLDHLDNQIIYRFLSQSATNLRTS
PWLEEPFSFYNMLLALSWKRHQFAVSIPQTRIFRQLKKLFIYDCLTRSSR
QVIENAFSLMFSQGDLDYLFLIYITTNNSFASLQWTPQHIETCCHIFEKN
DTFRLLLEPILKRLPQLNHSKQDLIKALMYFSKSFLFNLQHFVIEIPSFS
LPTYTGNSNLYKALKNIVNQWLAQLPGKRHLNEKHLQLFCSHIEQILKNK
QPALTVVLISSNFINAKLLTDTIPRYFSDKGIHFYSFYLLRDDIYQIPSL
KPDLVITHSRLIPFVKNDLVKGVTVAEFSFDNPDYSIASIQNLIYQLKDK
KYQDFLNEQLQ

[1070] Orf 78 is thought to be a collagen binding protein (Cbp). An example of the nucleotide sequence encoding Cbp (SEQ ID NO:90) and a Cbp amino acid sequence (SEQ ID NO:91) are set forth below.

SEQ ID NO: 90

TTGCAAAAGAGGGATAAAACCAATTATGGAAGCGCTAACAACAAACGACG
ACAAACGACGATCGGATTACTGAAAGTATTTTTGACGTTTGTAGCTCTGA
TAGGAATAGTAGGGTTTTCTATCAGAGCGTTCGGAGCTGAAGAAAAATCT
ACTGAAACTAAAAAAACGTCAGTCATTATTAGAAAATATGCTGAAGGTGA
CTACTCTAAACTTCTAGAGGGAGCAACTTTGCGTTTAACAGGGGAAGATA
TCCCAGATTTTCAAGAAAAAGTCTTCCAAAGTAATGGAACAGGAGAAAAG
ATTGAATTATCAAATGGGACTTATACCTTAACAGAAACATCATCTCCAGA
TGGATATAAAATTACGGAGCCGATTAAGTTTAGAGTAGTGAATAAAAAAG
TATTTATCGTCCAAAAAGATGGTTCTCAAGTGGAAAACCCAAACAAAGAA
CTAGGTTCTCCATATACTATAGAGGCATACAATGATTTTGATGAATTTGG
CTTACTGTCAACACAAAATTATGCGAAATTTTATTATGGAAAAAACTATG
ATGGCAGTTCACAAATTGTTTATTGCTTCAATGCCAACTTGAAATCTCCA
CCTGACTCGGAAGATCATGGTGCTACAATAAATCCTGACTTTACGACTGG
TGATATTAGGTACAGTCATATTGCTGGTTCAGATTTGATAAAATACGCTA
ATACAGCTAGGGATGAAGATCCTCAATTATTTTTAAAACACGTAAAAAAA
GTAATTGAAAATGGGTATCATAAAAAAGGTCAAGCTATTCCATATAACGG
TCTGACTGAGGCACAGTTTCGTGCGGCTACTCAACTGGCAATTTATTATT
TTACAGATAGTGTTGACTTAACTAAGGATAGATTGAAAGACTTCCATGGA
TTTGGAGATATGAATGATCAAACTTTGGGTGTAGCTAAAAAAATTGTAGA
ATACGCTTTGAGTGATGAAGATTCAAAACTAACAAATCTTGATTTCTTCG
TACCTAATAATAGCAAATACCAATCTCTTATTGGGACAGAATACCATCCA
GATGATTTGGTTGACGTGATTCGTATGGAAGATAAAAAGCAAGAAGTTAT
TCCAGTAACTCATAGTTTGACGGTGCAAAAAACAGTAGTCGGTGAGTTGG
GAGATAAGACTAAAGGCTTTCAATTTGAACTTGAGTTGAAAGATAAAACT
GGACAGCCTATTGTTAACACTCTAAAAACTAATAATCAAGATTTAGTAGC
TAAAGATGGGAAATATTCATTTAATCTAAAGCATGGTGACACCATAAGAA
TAGAAGGATTACCGACGGGATATTCTTATACCCTGAAAGAGACTGAAGCT
AAGGATTATATAGTAACTGTTGATAACAAAGTTAGTCAAGAAGCTCAATC
AGCAAGTGAGAATGTCACAGCAGACAAAGAAGTCACTTTTGAAAACCGAA
AAGATCTTGTCCCACCAACTGGTTTGACAACAGATGGGGCTATCTATCTT
TGGTTATTACTACTTGTTCCATTTGGGTTATTGGTTTGGCTATTTGGTCG
TAAAGGGTTAAAAAATGAC

SEQ ID NO: 91

MQKRDKTNYGSANNKRRQTTIGLLKVFLTFVALIGIVGFSIRAFGAEEKS
TETKKTSVIIRKYAEGDYSKLLEGATLRLTGEDIPDFQEKVFQSNGTGEK
IELSNGTYTLTETSSPDGYKITEPIKFRVVNKKVFIVQKDGSQVENPNKE
LGSPYTIEAYNDFDEFGLLSTQNYAKFYYGKNYDGSSQIVYCFNANLKSP
PDSEDHGATINPDFTTGDIRYSHIAGSDLIKYANTARDEDPQLFLKHVKK
VIENGYHKKGQAIPYNGLTEAQFRAATQLAIYYFTDSVDLTKDRLKDFHG
FGDMNDQTLGVAKKIVEYALSDEDSKLTNLDFFVPNNSKYQSLIGTEYHP
DDLVDVIRMEDKKQEVIPVTHSLTVQKTVVGELGDKTKGFQFELELKDKT
GQPIVNTLKTNNQDLVAKDGKYSFNLKHGDTIRIEGLPTGYSYTLKETEA
KDYIVTVDNKVSQEAQSASENVTADKEVTFENRKDLVPPTGLTTDGAIYL
WLLLLVPFGLLVWLFGRKGLKND

[1071] Orf 78 contains an amino acid motif indicative of a cell wall anchor: SEQ ID NO:184 VPPTG (shown in italics in SEQ ID NO:91, above). In some recombinant host cell systems, it may be preferable to remove this motif to facilitate secretion of a recombinant Orf 78 protein from the host cell. Alternatively, in other recombinant host cell systems, it may be preferable to use the cell wall anchor motif to anchor the recombinantly expressed protein to the cell wall. The extracellular domain of the expressed protein may be cleaved during purification or the recombinant protein may be left attached to either inactivated host cells or cell membranes in the final composition.

[1072] Three E boxes containing conserved glutamic residues have been identified in Orf 78. The E-box motifs are underlined in SEQ ID NO:91, below. The conserved glutamic acid (E) residues, at amino acid residues 112, 395, and 447, are marked in bold. The E box motifs, in particular the conserved glutamic acid residues, are thought to be important for the formation of oligomeric pilus-like structures of Orf 78. Preferred fragments of Orf 78 include at least one conserved glutamic acid residue. Preferably, fragments include at least one E box motif.

SEQ ID NO: 91

MQKRDKTNYGSANNKRRQTTIGLLKVFLTFVALIGIVGFSIRAFGAEEKS
TETKKTSVIIRKYAEGDYSKLLEGATLRLTGEDIPDFQEKVFQSNGTGEK
IELSNGTYTLTETSSPDGYKITEPIKFRVVNKKVFIVQKDGSQVENPNKE
LGSPYTIEAYNDFDEFGLLSTQNYAKFYYGKNYDGSSQIVYCFNANLKSP
PDSEDHGATINPDFTTGDIRYSHIAGSDLIKYANTARDEDPQLFLKHVKK
VIENGYHKKGQAIPYNGLTEAQFRAATQLAIYYFTDSVDLTKDRLKDFHG
FGDMNDQTLGVAKKIVEYALSDEDSKLTNLDFFVPNNSKYQSLIGTEYHP
DDLVDVIRMEDKKQEVIPVTHSLTVQKTVVGELGDKTKGFQFELELKDKT
GQPIVNTLKTNNQDLVAKDGKYSFNLKHGDTIRIEGLPTGYSYTLKETEA
KDYIVTVDNKVSQEAQSASENVTADKEVTFENRKDLVPPTGLTTDGAIYL
WLLLLVPFGLLVWLFGRKGLKND

[1073] Orf 79 is thought to be a LepA signal peptidase I. An example of the nucleotide sequence encoding a LepA signal peptidase I (SEQ ID NO:92) and a LepA signal peptidase I amino acid sequence (SEQ ID NO:93) are set forth below.

SEQ ID NO: 92

ATGACTAATTACCTAAATCGTTTAAATGAGAATTCACTATTTAAAGCTTT
CATACGGTTAGTACTTAAGATTTCTATTATTGGGTTTCTAGGTTACATTC
TATTTCAGTATGTTTTTGGTGTTATGATTATTAACACTAATGATATGAGT
CCTGCTTTAAGTGCAGGTGACGGTGTTTTATATTATCGTTTGACTGATCG
CTATCATATTAATGATGTGGTGGTCTATGAGGTTGATAACACTTTGAAAG
TTGGTCGAATTGTCGCTCAAGCTGGCGATGAGGTTAGTTTTACGCAAGAA
GGAGGACTGTTGATTAATGGGCATCCACCAGAAAAAGAGGTCCCTTACCT
GACGTATCCTCACTCAAGTGGCCCAAACTTTCCCTATAAAGTTCCTACGG
GTAAGTATTTCATATTGAATGATTATCGTGAAGAACGTTTGGACAGTCGT
TATTATGGGGCGTTACCCGTCAATCAAATAAAAGGGAAAATCTCAACTCT
ATTAAGAGTGAGAGGAATT

SEQ ID NO: 93

MTNYLNRLNENSLFKAFIRLVLKISIIGFLGYILFQYVFGVMIININDMS
PALSAGDGVLYYRLTDRYHINDVVVYEVDNTLKVGRIVAQAGDEVSFTQE
GGLLINGHPPEKEVPYLTYPHSSGPNFPYKVPTGKYFILNDYREERLDSR
YYGALPVNQIKGKISTLLRVRGI

[1074] Orf 80 is thought to be a fimbrial protein. An example of the nucleotide sequence encoding the fimbrial protein (SEQ ID NO:94) and a fimbrial protein amino acid sequence (SEQ ID NO:95) are set forth below.

SEQ ID NO: 94

TTGGAGAGAGAAAAAATGAAAAAAAACAAATTATTACTTGCTACTGCAAT
CTTAGCAACTGCTTTAGGAACAGCTTCTTTAAATCAAAACGTAAAAGCTG
AGACGGCAGGGGTTGTAACAGGAAAATCACTACAAGTTACAAAGACAATG
ACTTATGATGATGAAGAGGTGTTAATGCCCGAAACCGCCTTTACTTTTAC
TATAGAGCCTGATATGACTGCAAGTGGAAAAGAAGGCAGCCTAGATATTA
AAAATGGAATTGTAGAAGGCTTAGACAAACAAGTAACAGTAAAATATAAG
AATACAGATAAAACATCTCAAAAAACTAAAATAGCACAATTTGATTTTTC
TAAGGTTAAATTTCCAGCTATAGGTGTTTACCGCTATATGGTTTCAGAGA
AAAACGATAAAAAAGACGGAATTACGTACGATGATAAAAAGTGGACTGTA
GATGTTTATGTTGGGAATAAGGCCAATAACGAAGAAGGTTTCGAAGTTCT
ATATATTGTATCAAAAGAAGGTACTTCTAGTACTAAAAAACCAATTGAAT
TTACAAACTCTATTAAAACTACTTCCTTAAAAATTGAAAAACAAATAACT
GGCAATGCAGGAGATCGTAAAAAATCATTCAACTTCACATTAACATTACA
ACCAAGTGAATATTATAAAACTGGATCAGTTGTGAAAATCGAACAGGATG
GAAGTAAAAAAGATGTGACGATAGGAACGCCTTACAAATTTACTTTGGGA
CACGGTAAGAGTGTCATGTTATCGAAATTACCAATTGGTATCAATTACTA
TCTTAGTGAAGACGAAGCGAATAAAGACGGCTACACTACAACGGCAACAT
TAAAAGAACAAGGCAAAGAAAAGAGTTCCGATTTCACTTTGAGTACTCAA
AACCAGAAAACAGACGAATCTGCTGACGAAATCGTTGTCACAAATAAGCG
TGACACTCAAGTTCCAACTGGTGTTGTAGGGACCCTTGCTCCATTTGCAG
TTCTTAGCATTGTGGCTATTGGTGGAGTTATCTATATTACAAAACGTAAA
AAAGCT

SEQ ID NO: 95
1MEREKMKKNKLLLATAILATALGTASLNQNVKAETAGVVTGKSLQVTKTM
TYDDEEVLMPETAFTFTIEPDMTASGKEGSLDIKNGIVEGLDKQVTVKYK
NTDKTSQKTKIAQFDFSKVKFPAIGVYRYMVSEKNDKKDGITYDDKKWTV
DVYVGNKANNEEGFEVLYIVSKEGTSSTKKPIEFTNSIKTTSLKIEKQIT
GNAGDRKKSFNFTLTLQPSEYYKTGSVVKIEQDGSKKDVTIGTPYKFTLG
HGKSVMLSKLPIGINYYLSEDEANKDGYTTTATLKEQGKESSDFTLSTQN
QKTDESADEIVVTNKRDTQVPTGVVGTLAPFAVLSIVAIGGVIYITKRKK
A

[1075] Orf 82 contains an amino acid motif indicative of a cell wall anchor: SEQ ID NO:140 QVPTG (shown in italics in SEQ ID NO:95, above). In some recombinant host cell systems, it may be preferable to remove this motif to facilitate secretion of a recombinant Orf 82 protein from the host cell. Alternatively, in other recombinant host cell systems, it may be preferable to use the cell wall anchor motif to anchor the recombinantly expressed protein to the cell wall. The extracellular domain of the expressed protein may be cleaved during purification or the recombinant protein may be left attached to either inactivated host cells or cell membranes in the final composition.

[1076] An E box containing a conserved glutamic residue has been identified in Orf 80. The E-box motif is underlined in SEQ ID NO:95, below. The conserved glutamic acid (E), at amino acid residue 270, is marked in bold. The E box motif, in particular the conserved glutamic acid residue, is thought to be important for the formation of oligomeric pilus-like structures of Orf 80. Preferred fragments of Orf 80 include at least one conserved glutamic acid residue. Preferably, fragments include at least one E box motif.

SEQ ID NO: 95

MEREKMKKNKLLLATAILATALGTASLNQNVKAETAGVVTGKSLQVTKTM
TYDDEEVLMPETAFIFTIEPDMTASGKEGSLDIKNGIVEGLDKQVTVKYK
NTDKTSQKTKIAQFDFSKVKFPAIGVYRYMVSEKNDKKDGITYDDKKWTV
DVYVGNKANNEEGFEVLYIVSKEGTSSTKKPIEFTNSIKTTSLKIEKQIT
GNAGDRKKSFNFTLTLQPSEYYKTGSVVKIEQDGSKKDVTIGTPYKFTLG
HGKSVMLSKLPIGINYYLSEDEANKDGYTTTATLKEQGKEKSSDFTLSTQ
NQKTDESADEIVVTNKRDTQVPTGVVGTLAPFAVLSIVAIGGVIYITKRK
KA

[1077] Orf 81 is thought to be a SrtC2 type sortase. An example of the nucleotide sequence encoding the SrtC2 sortase (SEQ ID NO:96) and a SrtC2 sortase amino acid sequence (SEQ ID NO:97) are set forth below.

SEQ ID NO: 96

GTGATTAGTCAAAGAATGATGATGACAATTGTACAGGTTATCAATAAAGC
CATTGATACTCTCATTCTTATCTTTTGTTTAGTCGTACTATTTTTAGCTG
GTTTTGGTTTGTGGGATTCTTATCATCTCTATCAACAAGCAGACGCTTCT
AATTTCAAAAAATTTAAAACAGCTCAACAACAGCCTAAATTTGAAGACTT
GTTAGCTTTGAATGAGGATGTCATTGGTTGGTTAAATATCCCAGGGACTC
ATATTGATTATCCTCTAGTTCAGGGAAAAACGAATTTAGAGTATATTAAT
AAAGCAGTTGATGGCAGTGTTGCCATGTCTGGTAGTTTATTTTTAGATAC
ACGGAATCATAATGATTTTACGGACGATTACTCTCTGATTTATGGCCATC
ATATGGCAGGTAATGCCATGTTTGGCGAAATTCCAAAATTTTTAAAAAAG
GATTTTTTCAACAAACATAATAAAGCTATCATTGAAACAAAAGAGAGAAA
AAAACTAACCGTCACTATTTTTGCTTGTCTCAAGACAGATGCCTTTGACC
AGTTAGTTTTTAATCCTAATGCTATTACCAATCAAGACCAACAAAAGCAG
CTCGTTGATTATATCAGTAAAAGATCAAAACAATTTAAACCTGTTAAATT
GAAGCATCATACAAAGTTCGTTGCTTTTTCAACGTGTGAAAATTTTTCTA
CTGACAATCGTGTTATCGTTGTCGGTACTATTCAAGAA

SEQ ID NO: 97

MISQRMMMTIVQVINKAIDTLILIFCLVVLFLAGFGLWDSYHLYQQADAS
NFKKFKTAQQQPKFEDLLALNEDVIGWLNIPGTHIDYPLVQGKTNLEYIN
KAVDGSVAMSGSLFLDTRNHNDFTDDYSLIYGHHMAGNANFGEIPKFLKK
DFFNKHNKAIIETKERKKLTVTIFACLKTDAFDQLVFNPNAITNQDQQKQ
LVDYISKRSKQFKPVKLKHHTKFVAFSTCENFSTDNRVIVVGTIQE

[1078] Orf 82 is referred to as a hypothetical protein. It contains a sortase substrate motif LPXAG shown in italics in SEQ ID NO:99. An example of the nucleotide sequence encoding the hypothetical protein (SEQ ID NO:98) and a hypothetical protein amino acid sequence (SEQ ID NO:99) are set forth below.

SEQ ID NO: 98

TTGCTTTTTCAACGTGTGAAAATTTTTCTACTGACAATCGTGTTATCGTT
GTCGGTACTATTCAAGAATAACGAAAGGAGGAGACTTTTGAGAAAATATT
GGAAAATGTTATTTTCTGTCGTAATGATATTAACCATGCTGGCCTTTAAT
CAGACTGTTTTAGCAAAAGACAGCACTGTTCAAACTAGCATTAGTGTCGA
AAATGTCTTAGAGAGAGCAGGCGATAGTACCCCATTTTCGGTTGCATTAG
AATCAATTGATGCGATGAAAACAATAGACGAAATAACAATTGCTGGTTCT
GGAAAAGCAAGCTTTTCCCCTCTGACCTTCACAACAGTTGGGCAATATAC
TTATCGTGTTTATCAGAAGCCTTCACAAAATAAAGATTATCAAGCAGATA
CTACTGTATTTGACGTTCTTGTCTATGTGACCTATGATGAAGATGGGACT
CTAGTCGCAAAAGTTATTTCTCGAAGGGCTGGAGACGAAGAAAAATCAGC
GATTACTTTTAAGCCCAAACGGTTAGTAAAACCAATACCGCCTAGACAAC
CTAACATCCCTAAAACCCCATTACCATTAGCTGGTGAAGTAAAAAGTTTA
TTGGGTATCTTAAGTATCGTATTACTGGGGTTACTAGTTCTTCTTTATGT
TAAAAAACTGAAGAGTAGGCTA

SEQ ID NO: 99

MLFQRVKIFLLTIVLSLSVLFKNNERRRLLRKYWKMLFSVVMILTMLAFN
QTVLAKDSTVQTSISVENVLERAGDSTPFSVALESIDAMKTIDEITIAGS
GKASFSPLTFTTVGQYTYRVYQKPSQNKDYQADTTVFDVLVYVTYDEDGT
LVAKVISRRAGDEEKSAITFKPKRLVKPIPPRQPNIPKTPLPLAGEVKSL
LGILSIVLLGLLVLLYVKKLKSRL

[1079] Orf 82 contains an amino acid motif indicative of a cell wall anchor: SEQ ID NO:185 LPLAG (shown in italics in SEQ ID NO:99, above). In some recombinant host cell systems, it may be preferable to remove this motif to facilitate secretion of a recombinant Orf 82 protein from the host cell. Alternatively, in other recombinant host cell systems, it may be preferable to use the cell wall anchor motif to anchor the recombinantly expressed protein to the cell wall. The extracellular domain of the expressed protein may be cleaved during purification or the recombinant protein may be left attached to either inactivated host cells or cell membranes in the final composition.

[1080] A pilin motif, discussed above, containing a conserved lysine (K) residue has also been identified in Orf 82. The pilin motif sequence is underlined in SEQ ID NO:99, below. Conserved lysine (K) residues are also marked in bold, at amino acid residues 173 and 188. The pilin sequence, in particular the conserved lysine residues, are thought to be important for the formation of oligomeric, pilus-like structures. Preferred fragments of Orf 82 include at least one conserved lysine residue. Preferably, fragments include the pilin sequence.

SEQ ID NO: 99

MLFQRVKIFLLTIVLSLSVLFKNNERRRLLRKYWKMLFSVVMILTMLAFN
QTVLAKDSTVQTSISVENVLERAGDSTPFSVALESIDAMKTIDEITIAGS
GKASFSPLTFTTVGQYTYRVYQKPSQNKDYQADTTVFDVLVYVTYDEDGT
LVAKVISRRAGDEEKSAITFKPKRLVKPIPPRQPNIPKTPLPLAGEVKSL
LGILSIVLLGLLVLLYVKKLKSRL

[1081] An E box containing a conserved glutamic residue has been identified in Orf 82. The E-box motif is underlined in SEQ ID NO:99, below. The conserved glutamic acid (E), at amino acid residue 163, is marked in bold. The E box motif, in particular the conserved glutamic acid residue, is thought to be important for the formation of oligomeric pilus-like structures of Orf 82. Preferred fragments of Orf 82 include the conserved glutamic acid residue. Preferably, fragments include the E box motif.

SEQ ID NO: 99

MLFQRVKIFLLTIVLSLSVLFKNNERRRLLRKYWKMLFSVVMILTMLAFN
QTVLAKDSTVQTSISVENVLERAGDSTPFSVALESIDAMKTIDEITIAGS
GKASFSPLTFTTVGQYTYRVYQKPSQNKDYQADTTVFDVLVYVTYDEDGT
LVAKVISRRAGDEEKSAITFKPKRLVKPIPPRQPNIPKTPLPLAGEVKSL
LGTLSIVLLGLLVLLYVKKLKSRL

[1082] Orf 83 is thought to be a multiple sugar metabolism regulator protein. An example of a nucleotide sequence encoding the sugar metabolism regulator protein (SEQ ID NO:100) and a sugar metabolism regulator protein amino acid sequence (SEQ ID NO:101) are set forth below.

SEQ ID NO: 100

ATGATACAACTAAGGATGGGGGCAATCTATCAAATGGTTATATTCGATTT
AAAACATGTGCAAACATTACACAGCTTGTCTCAATTACCTATTTCAGTGA
TGTCACAAGATAAGGCACTTATTCAAGTATATGGTAATGACGACTATTTA
TTATGTTACTATCAATTTTTAAAGCATCTAGCTATTCCTCAAGCTGCACA
AGATGTTATTTTTTATGAGGGTTTATTTGAAGAGTCCTTTATGATTTTTC
CTCTTTGTCACTACATTATTGCCATTGGACCTTTCTATCCTTATTCACTT
AATAAAGACTATCAGGAACAATTAGCTAATAATTTTTTAAAACATTCTTC
TCATCGTAGCAAAGAAGAGCTCTTGTCCTATATGGCACTTGTCCCACATT
TTCCAATTAATAATGTGCGGAACCTTTTGATAGCTATTGACGCTTTTTTT
GACACACAATTTGAGACGACTTGCCAACAAACGATTCATCAATTGTTGCA
GCATTCAAAACAGATGACTGCTGATCCTGATATCATTCATCGCCTTAAGC
ATATTAGCAAAGCATCTAGCCAATTACCGCCTGTTTTAGAGCACCTAAAT
CATATTATGGATCTGGTAAAGCTAGGCAATCCACAATTGCTCAAGCAAGA
AATCAATCGCATCCCCTTATCAAGTATCACCTCATCTTCTATTTCTGCTC
TAAGGGCGGAAAAGAACCTCACTGTTATCTATTTAACTAGGTTACTGGAA
TTCAGTTTTGTAGAAAATACTGACGTAGCAAAGCATTATAGCCTTGTCAA
ATACTACATGGCCTTAAATGAAGAAGCGAGTGACTTGCTCAAAGTTTTGA
GAATTCGCTGTGCAGCTATCATCCATTTTTCCGAATCATTAACCAATAAA
AGTATTTCTGATAAACGTCAAATGTACAATAGTGTGCTTCATTATGTCGA
TAGTCACCTGTATTCCAAATTAAAGGTATCTGATATCGCTAAGCGCCTAT
ATGTTTCCGAATCTCACTTACGTTCAGTCTTTAAAAAATACTCAAATGTT
TCCTTACAACATTATATTCTAAGTACAAAAATCAAAGAAGCTCAACTACT
CTTAAAACGAGGAATTCCTGTTGGAGAAGTGGCTAAAAGCTTATATTTTT
ATGACACTACCCATTTTCATAAAATCTTTAAAAAATACACGGGTATTTCT
TCAAAAGACTATCTTGCTAAATACCGAGATAATATT

SEQ ID NO: 101

MIQLRMGAIYQMVIFDLKHVQTLHSLSQLPISVMSQDKALIQVYGNDDYL
LCYYQFLKHLAIPQAAQDVIFYEGLFEESFMIFPLCHYIIAIGPFYPYSL
NKDYQEQLANNFLKHSSHRSKEELLSYMALVPHFPINNVRNLLIAIDAF
FDTQFETTCQQTIHQLLQHSKQMTADPDIIHRLKHISKASSQLPPVLEH
LNHIMDLVKLGNPQLLKQEINRIPLSSITSSSISALRAEKNLTVIYLTR
LLEFSFVENTDVAKHYSLVKYYMALNEEASDLLKVLRIRCAAIIHFSES
LTNKSISDKRQMYNSVLHYVDSHLYSKLKVSDIAKRLYVSESHLRSVFK
KYSNVSLQHYILSTKIKEAQLLLKRGIPVGEVAKSLYFYDTTHFHKIFK
KYTGISSKDYLAKYRDNI

[1083] Orf 84 is thought to be a F2-like fibronectin-binding protein. An example of a nucleotide sequence encoding the F2-like fibronectin-binding protein (SEQ ID NO:102) and a F2-like fibronectin-binding protein amino acid sequence (SEQ ID NO:103) are set forth below.

SEQ ID NO: 102

ATGACACAAAAAAATAGCTATAAGTTAAGCTTCCTGTTATCCCTAACAGG
ATTTATTTTAGGTTTATTATTGGTTTTTATAGGATTGTCCGGAGTATCAG
TAGGACATGCGGAAACAAGAAATGGAGCAAACAAACAAGGAGCTTTTGAA
ATCAAGAAAAATAAAAGTCAAGAAGAATATAATTATGAAGTTTATGATAA
CAGAAACATACTTCAGGATGGGGAACATAAACTTGAAATAAAAAGAGTTG
ATGGGACAGGTAAAACTTATCAAGGTTTTTGCTTTCAGTTAACGAAAAAT
TTTCCCACTGCTCAAGGTGTAAGTAAAAAGCTGTATAAAAAATTGAGTAG
TAGTGATGAAGAAACACTAAAGCAATATGCCTCTAAGTATACAAGTAATA
GGAGAGGAGATACTAGTGGTAATCTTAAAAAGCAAATTGCTAAGGTTCTG
ACAGAAGGTTACCCAACTAACAAAAGTGATTGGTTAAATGGATTGACTGA
AAACGAAAAAATAGAAGTAACCCAGGATGCAATTTGGTATTTTACAGAAA
CGACAGTTCCGGCTGATAGAAGTTATACGAATCGCAACGTAAATAGTCAA
AAAATGAAAGAAGTGTATCAAAAGCTAATTGATACAACAGATATAGATAA
ATATGAAGATGTACAATTTGATTTATTTGTGCCACAAGATACAAACTTAC
AGGCAGTAATTAGTGTAGAGCCTGTTATCGAAAGCCTTCCTTGGACATCG
TTGAAGCCAATAGCCCAGAAGGATATCACTGCCAAAAAAATCTGGGTAGA
TGCACCTAAAGAAAAACCAATTATTTATTTTAAGCTATATAGACAGCTGC
CTGGAGAAAAGGAAGTAGCAGTGGATGACGCTGAGCTAAAACAGATAAAT
AGTGAAGGTCAACAAGAAATATCAGTAACTTGGACAAATCAACTTGTTAC
AGATGAAAAAGGAATGGCTTACATTTATTCTGTAAAAGAAGTAGATAAAA
ATGGCGAGTTACTTGAGCCAAAAGATTATATCAAGAAGGAAGATGGACTT
ACAGTTACTAATACTTATGTAAAGCCAACTAGTGGGCACTATGATATAGA
AGTGACATTTGGAAATGGACATATTGATATTACAGAAGATACTACACCAG
ATATTGTTTCAGGTGAAAACCAAATGAAGCAAATAGAGGGAGAAGATAGT
AAGCCTATTGATGAAGTAACGGAAAATAATTTAATTGAATTTGGTAAAAA
CACGATGCCAGGTGAAGAAGATGGCACAAATTCTAATAAGTATGAAGAAG
TCGAAGACTCACGCCCAGTTGATACCTTGTCAGGTTTATCAAGTGAGCAA
GGTCAGTCCGGTGATATGACAATTGAAGAAGATAGTGCTACCCATATTAA
ATTCTCAAAACGTGATATTGACGGCAAAGAGTTAGCTGGTGCAACTATGG
AGTTGCGTGATTCATCTGGTAAAACTATTAGTACATGGATTTCAGATGGA
CAAGTGAAAGATTTCTACCTGATGCCAGGAAAATATACATTTGTCGAAAC
CGCAGCACCAGACGGTTATGAGATAGCAACTGCTATTACCTTTACAGTTA
ATGAGCAAGGTCAGGTTACTGTAAATGGCAAAGCAACTAAAGGTGACGCT
CATATTGTCATGGTTGATGCTTACAAGCCAACTAAGGGTTCAGGTCAGGT
TATTGATATTGAAGAAAAGCTTCCAGACGAGCAGGGCCATTCTGGCTCAA
CTACTGAAATAGAAGATAGCAAGTCTTCAGACGTTATCATTGGTGGTCAG
GGGCAGATTGTCGAGACAACAGAGGATACCCAAACTGGCATGCACGGGGA
TTCTGGTTGTAAAACGGAAGTCGAAGATACTAAACTAGTACAATCCTTCC
ACTTTGATAACAAGGAATCAGAAAGTAACTCTGAGATTCCTAAAAAAGAT
AAGCCAAAGAGTAATACTAGTTTACCAGCAACTGGTGAGAAGCAACATAA
TATGTTCTTTTGGATGGTTACTTCTTGCTCACTTATTAGTAGTGTTTTTG
TAATATCACTAAAAACTAAAAAACGCCTATCATCATGT

SEQ ID NO: 103

MTQKNSYKLSFLLSLTGFILGLLLVFIGLSGVSVGHAETRNGANKQGAFE
IKKNKSQEEYNYEVYDNRNILQDGEHKLEIKRVDGTGKTYQGFCFQLTKN
FPTAQGVSKKLYKKLSSSDEETLKQYASKYTSNRRGDTSGNLKKQIAKVL
TEGYPTNKSDWLNGLTENEKIEVTQDAIWYFTETTVPADRSYTNRNVNSQ
KMKEVYQKLIDTTDIDKYEDVQFDLFVPQDTNLQAVISVEPVIESLPWTS
LKPIAQKDITAKKIWVDAPKEKPIIYFKLYRQLPGEKEVAVDDAELKQIN
SEGQQEISVTWTNQLVTDEKGMAYIYSVKEVDKNGELLEPKDYIKKEDGL
TVTNTYVKPTSGHYDIEVTFGNGHIDITEDTTPDIVSGENQMKQIEGEDS
KPIDEVTENNLIEFGKNTMPGEEDGTNSNKYEEVEDSRPVDTLSGLSSEQ
GQSGDMTIEEDSATHIKFSKRDIDGKELAGATMELRDSSGKTISTWISDG
QVKDFYLMPGKYTFVETAAPDGYEIATAITFTVNEQGQVTVNGKATKGDA
HIVMVDAYKPTKGSGQVIDIEEKLPDEQGHSGSTTEIEDSKSSDVIIGGQ
GQIVETTEDTQTGMHGDSGCKTEVEDTKLVQSFHFDNKESESNSEIPKKD
KPKSNTSLPATGEKQHNMFFWMVTSCSLISSVFVISLKTKKRLSSC

[1084] Orf 84 contains an amino acid motif indicative of a cell wall anchor: SEQ ID NO:181 LPATG (shown in italics in SEQ ID NO:103, above). In some recombinant host cell systems, it may be preferable to remove this motif to facilitate secretion of a recombinant Orf 84 protein from the host cell. Alternatively, in other recombinant host cell systems, it may be preferable to use the cell wall anchor motif to anchor the recombinantly expressed protein to the cell wall. The extracellular domain of the expressed protein may be cleaved during purification or the recombinant protein may be left attached to either inactivated host cells or cell membranes in the final composition.

[1085] A pilin motif, discussed above, containing a conserved lysine (K) residue has also been identified in Orf 84. The pilin motif sequence is underlined in SEQ ID NO:103, below. A conserved lysine (K) residue is also marked in bold, at amino acid residue 270. The pilin sequence, in particular the conserved lysine residue, is thought to be important for the formation of oligomeric, pilus-like structures. Preferred fragments of Orf 84 include the conserved lysine residue. Preferably, fragments include the pilin sequence.

SEQ ID NO: 103

MTQKNSYKLSFLLSLTGFILGLLLVFIGLSGVSVGHAETRNGANKQGAFE
IKKNKSQEEYNYEVYDNRNILQDGEHKLEIKRVDGTGKTYQGFCFQLTKN
FPTAQGVSKKLYKKLSSSDEETLKQYASKYTSNRRGDTSGNLKKQIAKVL
TEGYPTNKSDWLNGLTENEKIEVTQDAIWYFTETTVPADRSYTNRNVNSQ
KMKEVYQKLIDTTDIDKYEDVQFDLFVPQDTNLQAVISVEPVIESLPWTS
LKPIAQKDITAKKIWVDAPKEKPIIYFKLYRQLPGEKEVAVDDAELKQIN
SEGQQEISVTWTNQLVTDEKGMAYIYSVKEVDKNGELLEPKDYIKKEDGL
TVTNTYVKPTSGHYDIEVTFGNGHIDITEDTTPDIVSGENQMKQIEGEDS
KPIDEVTENNLIEFGKNTMPGEEDGTNSNKYEEVEDSRPVDTLSGLSSEQ
GQSGDMTIEEDSATHIKFSKRDIDGKELAGATMELRDSSGKTISTWISDG
QVKDFYLMPGKYTFVETAAPDGYEIATAITFTVNEQGQVTVNGKATKGDA
HIVMVDAYKPTKGSGQVIDIEEKLPDEQGHSGSTTEIEDSKSSDVIIGGQ
GQIVETTEDTQTGMHGDSGCKTEVEDTKLVQSFHFDNKESESNSEIPKKD
KPKSNTSLPATGEKQHNMGGWMVTSCSLISSVFVISLKTKKRLSSC

[1086] An E box containing a conserved glutamic residue has been identified in Orf 84. The E-box motif is underlined in SEQ ID NO:103, below. The conserved glutamic acid (E), at amino acid residue 516, is marked in bold. The E box motif, in particular the conserved glutamic acid residue, is thought to be important for the formation of oligomeric pilus-like structures of Orf 84. Preferred fragments of Orf 84 include the conserved glutamic acid residue. Preferably, fragments include the E box motif.

SEQ ID NO: 103

MTQKNSYKLSFLLSLTGFILGLLLVFIGLSGVSVGHAETRNGANKQGAFE
IKKNKSQEEYNYEVYDNRNILQDGEHKLEIKRVDGTGKTYQGFCFQLTKN
FPTAQGVSKKLYKKLSSSDEETLKQYASKYTSNRRGDTSGNLKKQIAKVL
TEGYPTNKSDWLNGLTENEKIEVTQDAIWYFTETTVPADRSYTNRNVNSQ
KMKEVYQKLIDTTDIDKYEDVQFDLFVPQDTNLQAVISVEPVIESLPWTS
LKPIAQKDITAKKIWVDAPKEKPIIYFKLYRQLPGEKEVAVDDAELKQIN
SEGQQEISVTWTNQLVTDEKGMAYIYSVKEVDKNGELLEPKDYIKKEDGL
TVTNTYVKPTSGHYDIEVTFGNGHIDITEDTTPDIVSGENQMKQIEGEDS
KPIDEVTENNLIEFGKNTMPGEEDGTNSNKYEEVEDSRPVDTLSGLSSEQ
GQSGDMTIEEDSATHIKFSKRDIDGKELAGATMELRDSSGKTISTWISDG
QVKDFYLMPGKYTFVETAAPDGYEIATAITFTVNEQGQVTVNGKATKGDA
HIVMVDAYKPTKGSGQVIDIEEKLPDEQGHSGSTTEIEDSKSSDVIIGGQ
GQIVETTEDTQTGMHGDSGCKTEVEDTKLVQSFHFDNKESESNSEIPKKD
KPKSNTSLPATGEKQHNMGGWMVTSCSLISSVFVISLKTKKRLSSC

[1087] Examples of GAS AI-3 sequences from M18 strain isolate MGAS8232 are set forth below.

[1088] SpyM18_{—}0125 is a negative transcriptional regulator (Nra). An example of SpyM18_{—}0125 is set forth in SEQ ID NO:72.

SEQ ID NO: 72

MPYVKKKKDSFLVETYLEQSIRDKSELVLLLFKSPTIIFSHVAKQTGLTA
VQLKYYCKELDDFFGNNLDITIKKGKIICCFVKPVKEFYLHQLYDTSTIL
KLLVFFIKNGTTSQPLIKFSKKYFLSSSSAYRLRESLIKLLREFGLRVSK
NTIVGEEYRIRYLIAMLYSKFGIVIYPLDHLDNQIIYRFLSQSATNLRTS
PWLEEPFSFYNMLLALS

[1089] SpyM18_{—}0126 is thought to be a collagen binding protein (CBP). An example of SpyM18_{—}0126 is set forth in SEQ ID NO:73.

SEQ ID NO: 73

MQKRDKTNYGSANNKRRQTTIGLLKVFLTFVALIGIVGFSIRAFGAEEQS
TETKKTSVIIRKYAEGDYSKLLEGATLKLAQIEGSGFQEQSFESSTSGQK
LQLSDGTYILTETKSPQGYEIAEPITFKVTAGKVFIKGKDGQFVENQNKE
VAEPYSVTAYNDFDDSGFINPKTFTPYGKFYYAKNANGTSQVVYCFNVDL
HSPPDSLDKGETIDPDFNEGKEIKYTHILGADLFSYANNPRASTNDELLS
QVKKVLEKGYRDDSTTYANLTSVEFRAATQLAIYYFTDSVDLDNLADYHG
FGALTTEALNATKEIVAYAEDPANLPNISNLDFYVPNSNKYQSLIGTQYH
PESLVDIIRMEDKQAPIIPITHKLTISKTVTGTIADKKKEFNFEIHLKSS
DGQAISGTYPTNSGELTVTDGKATFTLKDGESLIVEGLPSGYSYEITETG
ASDYEVSVNGKNAPDGKATKASVKEDETITFENRKDLVPPTGLTTDGAIY
LWLLLLVLLGLWVWLIGRKGLKND

[1090] SpyM18_{—}0126 contains an amino acid motif indicative of a cell wall anchor: SEQ ID NO:184 VPPTG (shown in italics in SEQ ID NO:73, above). In some recombinant host cell systems, it may be preferable to remove this motif to facilitate secretion of a recombinant SpyM18_{—}0126 protein from the host cell. Alternatively, in other recombinant host cell systems, it may be preferable to use the cell wall anchor motif to anchor the recombinantly expressed protein to the cell wall. The extracellular domain of the expressed protein may be cleaved during purification or the recombinant protein may be left attached to either inactivated host cells or cell membranes in the final composition.

[1091] A pilin motif, discussed above, containing a conserved lysine (K) residue has also been identified in SpyM18_{—}0126. The pilin motif sequence is underlined in SEQ ID NO:73, below. Conserved lysine (K) residues are also marked in bold, at amino acid residues 172 and 179. The pilin sequence, in particular the conserved lysine residues, are thought to be important for the formation of oligomeric, pilus-like structures. Preferred fragments of SpyM18_{—}0126 include at least one conserved lysine residue. Preferably, fragments include the pilin sequence.

SEQ ID NO: 73

MQKRDKTNYGSANNKRRQTTIGLLKVFLTFVALIGIVGFSIRAFGAEEQS
TETKKTSVIIRKYAEGDYSKLLEGATLKLAQIEGSGFQEQSFESSTSGQK
LQLSDGTYILTETKSPQGYEIAEPITFKVTAGKVFIKGKDGQFVENQNKE
VAEPYSVTAYNDFDDSGFINPKTFTPYGKFYYAKNANGTSQVVYCFNVDL
HSPPDSLDKGETIDPDFNEGKEIKYTHILGADLFSYANNPRASTNDELLS
QVKKVLEKGYRDDSTTYANLTSVEFRAATQLAIYYFTDSVDLDNLADYHG
FGALTTEALNATKEIVAYAEDPANLPNISNLDFYVPNSNKYQSLIGTQYH
PESLVDIIRMEDKQAPIIPITHKLTISKTVTGTIADKKKEFNFEIHLKSS
DGQAISGTYPTNSGELTVTDGKATFTLKDGESLIVEGLPSGYSYEITETG
ASDYEVSVNGKNAPDGKATKASVKEDETITFENRKDLVPPTGLTTDGAIY
LWLLLLVLLGLWVWLIGRKGLKND

[1092] Three E boxes containing conserved glutamic residues have been identified in SpyM18_{—}0126. The E-box motifs are underlined in SEQ ID NO:73, below. The conserved glutamic acid (E) residues, at amino acid residues 112, 257, and 415, are marked in bold. The E box motifs, in particular the conserved glutamic acid residues, are thought to be important for the formation of oligomeric pilus-like structures of SpyM18_{—}0126. Preferred fragments of SpyM18_{—}0126 include at least one conserved glutamic acid residue. Preferably, fragments include at least one E box motif.

SEQ ID NO: 73

MQKRDKTNYGSANNKRRQTTIGLLKVFLTFVALIGIVGFSIRAFGAEEQS
TETKKTSVIIRKYAEGDYSKLLEGATLKLAQIEGSGFQEQSFESSTSGQK
LQLSDGTYILTETKSPQGYEIAEPITFKVTAGKVFIKGKDGQFVENQNKE
VAEPYSVTAYNDFDDSGFINPKTFTPYGKFYYAKNANGTSQVVYCFNVDL
HSPPDSLDKGETIDPDFNEGKEIKYTHILGADLFSYANNPRASTNDELLS
QVKKVLEKGYRDDSTTYANLTSVEFRAATQLAIYYFTDSVDLDNLADYHG
FGALTTEALNATKEIVAYAEDPANLPNISNLDFYVPNSNKYQSLIGTQYH
PESLVDIIRMEDKQAPIIPITHKLTISKTVTGTIADKKKEFNFEIHLKSS
DGQAISGTYPTNSGELTVTDGKATFTLKDGESLIVEGLPSGYSYEITETG
ASDYEVSVNGKNAPDGKATKASVKEDETITFENRKDLVPPTGLTTDGAIY
LWLLLLVLLGLWVWLIGRKGLKND

[1093] SpyM18_{—}0127 is a LepA protein. An example of SpyM18_{—}0127 is shown in SEQ ID NO:74.

SEQ ID NO: 74

MTNYLNRLNENPLFKAFIRLVLKISIIGFLGYILFQYIFGVMIINTNVMS
PALSAGDGILYYRLTDRYHINDVVVYEVDNTLKVGRIVAQAGDEVSFTQE
GGLLINGHPPEKEVPYLTYPHSSGPNFPYKVPTGTYFILNDYREERLDSR
YYGALPINQIKQKISTLLRVRGI

[1094] SpyM18_{—}0128 is thought to be a fimbrial protein. An example of SypM18 0128 is shown in SEQ ID NO:75.

SEQ ID NO: 75

MKKNKLLLATAILATALGTASLNQNVKAETAGVIDGSTLVVKKTFPSYTD
DKVLMPKADYTFKVEADDNAKGKTKDGLDIKPGVIDGLENTKTIHYGNSD
KTTAKEKSVNFDFANVKFPGVGVYRYTVSEVNGNKAGIAYDSQQWTVDVY
VVNREDGGFEAKYIVSTEGGQSDKKPVLFKNFFDTTSLKVTKKVTGNTGE
HQRSFSFTLLLTPNECFEKGQVVNILQGGETKKVVIGEEYSFTLKDKESV
TLSQLPVGIEYKVTEEDVTKDGYKTSATLKDGDVTDGYNLGDSKTTDKST
DEIVVTNKRDTQVPTGVVGTLAPFAVLSIVAIGGVIYITKRKKA

[1095] SpyM18_{—}0128 contains an amino acid motif indicative of a cell wall anchor: SEQ ID NO:140 QVPTG (shown in italics in SEQ ID NO:75, above). In some recombinant host cell systems, it may be preferable to remove this motif to facilitate secretion of a recombinant SpyM18_{—}0128 protein from the host cell. Alternatively, in other recombinant host cell systems, it may be preferable to use the cell wall anchor motif to anchor the recombinantly expressed protein to the cell wall. The extracellular domain of the expressed protein may be cleaved during purification or the recombinant protein may be left attached to either inactivated host cells or cell membranes in the final composition.

[1096] A pilin motif, discussed above, containing a conserved lysine (K) residue has also been identified in SpyM18_{—}0128. The pilin motif sequence is underlined in SEQ ID NO:75, below. A conserved lysine (K) residue is also marked in bold, at amino acid residue 57. The pilin sequence, in particular the conserved lysine residue, is thought to be important for the formation of oligomeric, pilus-like structures. Preferred fragments of SpyM18_{—}0128 include the conserved lysine residue. Preferably, fragments include at least one pilin sequence.

SEQ ID NO: 75

MKKNKLLLATAILATALGTASLNQNVKAETAGVIDGSTLVVKKTFPSYTD
DKVLMPKADYTFKVEADDNAKGKTKDGLDIKPGVIDGLENTKTIHYGNSD
KTTAKEKSVNFDFANVKFPGVGVYRYTVSEVNGNKAGIAYDSQQWTVDVY
VVNREDGGFEAKYIVSTEGGQSDKKPVLFKNFFDTTSLKVTKKVTGNTGE
HQRSFSFTLLLTPNECFEKGQVVNILQGGETKKVVIGEEYSFTLKDKESV
TLSQLPVGIEYKVTEEDVTKDGYKTSATLKDGDVTDGYNLGDSKTTDKST
DEIVVTNKRDTOVPTGVVGTLAPFAVLSIVAIGGVIYITKRKKA

[1097] An E box containing a conserved glutamic residue has been identified in SpyM18_{—}0128. The E-box motif is underlined in SEQ ID NO:75, below. The conserved glutamic acid (E), at amino acid residue 266, is marked in bold. The E box motif, in particular the conserved glutamic acid residue, is thought to be important for the formation of oligomeric pilus-like structures of SpyM18_{—}0128. Preferred fragments of SpyM18_{—}0128 include the conserved glutamic acid residue. Preferably, fragments include the E box motif.

SEQ ID NO: 75

MKKNKLLLATAILATALGTASLNQNVKAETAGVIDGSTLVVKKTFPSYTD
DKVLMPKADYTFKVEADDNAKGKTKDGLDIKPGVIDGLENTKTIHYGNSD
KTTAKEKSVNFDFANVKFPGVGVYRYTVSEVNGNKAGIAYDSQQWTVDVY
VVNREDGGFEAKYIVSTEGGQSDKKPVLFKNFFDTTSLKVTKKVTGNTGE
HQRSFSFTLLLTPNECFEKGQVVNILQGGETKKVVIGEEYSFTLKDKESV
TLSQLPVGIEYKVTEEDVTKDGYKTSATLKDGDVTDGYNLGDSKTTDKST
DEIVVTNKRDTQVPTGVVGTLAPFAVLSIVAIGGVIYITKRKKA

[1098] SpyM18_{—}0129 is a SrtC2 type sortase. An example of SpyM18_{—}0129 is shown in SEQ ID NO:76

SEQ ID NO: 76

MISQRMMMTIVQVINKAIDTLILIFCLVVLFLAGFGLWDSYHLYQQADAS
NFKKFKTAQQQPKFEDLLALNEDVIGWLNIPGTHMDYPLVQGKTNLEYIN
KAVDGSVAMSGSLFLDTRNHNDFTDDYSLIYGHHMAGNANFGEIPKFLKK
DFFNKHNKAIIETKERKKLTVTIFACLKTDAFDQLVFNPNAITNQDQQRQ
LVDYISKRSKQFKPVKLKHHTKFVAFSTCENFSTDNRVIVVGTIQE

[1099] SpyM18_{—}0130 is referred to as a hypothetical protein. An example of SpyM18_{—}0130 is shown in SEQ ID NO:77.

SEQ ID NO: 77

MRKYWKMLFSVVMILTMLAFNQTVLAKDSTVQTSISVENVLERAGDSTSF
SVALESIDAMKTIDEITIAGSGKASFSPLTFTTVGQYTYRVYQKPSQNKD
YQADTTVFDVLVYVTYDEDGTLVAKVISRRAGDEEKSAITFKPKRLVKPI
PPRQPDIPKTPLPLAGEVKSLLGILSIVLLGLLVLLYVKKLKSRL

[1100] SpyM18_{—}0130 contains an amino acid motif indicative of a cell wall anchor: SEQ ID NO:185 LPLAG (shown in italics in SEQ ID NO:77, above). In some recombinant host cell systems, it may be preferable to remove this motif to facilitate secretion of a recombinant SpyM18_{—}0130 protein from the host cell. Alternatively, in other recombinant host cell systems, it may be preferable to use the cell wall anchor motif to anchor the recombinantly expressed protein to the cell wall. The extracellular domain of the expressed protein may be cleaved during purification or the recombinant protein may be left attached to either inactivated host cells or cell membranes in the final composition.

[1101] A pilin motif, discussed above, containing a conserved lysine (K) residue has also been identified in SpyM18_{—}0130. The pilin motif sequence is underlined in SEQ ID NO:77, below. Conserved lysine (K) residues are also marked in bold, at amino acid residues 144, 159, and 169. The pilin sequence, in particular the conserved lysine residues, are thought to be important for the formation of oligomeric, pilus-like structures. Preferred fragments of SpyM18_{—}0130 include at least one conserved lysine residue. Preferably, fragments include the pilin sequence.

SEQ ID NO: 77

MRKYWKMLFSVVMILTMLAFNQTVLAKDSTVQTSISVENVLERAGDSTSF
SVALESIDAMKTIDEITIAGSGKASFSPLTFTTVGQYTYRVYQKPSQNKD
YQADTTVFDVLVYVTYDEDGTLVAKVISRRAGDEEKSAITFKPKRLVKPI
PPRQPDIPKTPLPLAGEVKSLLGILSIVLLGLLVLLYVKKLKSRL

[1102] An E box containing a conserved glutamic residue has been identified in SpyM18_{—}0130. The E-box motif is underlined in SEQ ID NO:77, below. The conserved glutamic acid (E), at amino acid residue 134, is marked in bold. The E box motif, in particular the conserved glutamic acid residue, is thought to be important for the formation of oligomeric pilus-like structures of SpyM18_{—}0130. Preferred fragments of SpyM18_{—}0130 include the conserved glutamic acid residue. Preferably, fragments include the E box motif.

SEQ ID NO: 77

MRKYWKMLFSVVMILTMLAFNQTVLAKDSTVQTSISVENVLEPAGDSTSF
SVALESIDAMKTIDEITIAGSGKASFSPLTFTTVGQYTYRVYQKPSQNKD
YQADTTVFDVLVYVTYDEDGTLVAKVISRRAGDEEKSAITFKPKRLVKPI
PPRQPDIPKTPLPLAGEVKSLLGILSIVLLGLLVLLYVKKLKSRL

[1103] SpyM18_{—}0131 is referred to as a putative multiple sugar metabolism regulator. An example of SpyM18_{—}0131 is set forth in SEQ ID NO:78.

SEQ ID NO: 78

MAIFDLKHVQTLHSLSQLPISVMSQDKALIQVYGNDDYLLCYYQFLKHLA
IPQAAQDVIFYEGLFEESFMIFFLCHYIIAIGPFYPYSLNKDYQEQLANN
CLKHSSHRSKEELLSYMALVPHFPINNVRNLLIAIDAFFDTQFETTCQQT
IHQLLQHSKQMTADPDIIHRLKHISKASSQLPPVLEHLNHIMDLVKLGNP
QLLKQEINRIPLSSITSSSISALRAEKNLTVIYLTRLLEFSFVENTDVAK
HYSLVKYYMALNEEASDLLKVLRIRCAAIIHFSESLTNKSISDKRQMYNS
VLHYVDSHLYSKLKVSDIAKRLYVSESHLRSVFKKYSNVSLQHYILSTKI
KEAQLLLKRGIPVGEVAKSLYFYDTTHFHKIFKKYTGISSKDYLAKYRDN
I

[1104] SpyM18_{—}0132 is a F2 like fibronectin-binding protein. An example of SpyM18_{—}0132 is set forth in SEQ ID NO:79.

SEQ ID NO: 79

MTQKNSYKLSFLLSLTGFILGLLLVFIGLSGVSVGHAETRNGANKQGAFE
IKKNKSQEEYNYEVYDNRNILQDGEHKLEIKRVDGTGKTYQGFCFQLTKN
FPTAQGVSKKLYKKLSSSDEETLKQYASKYTSNRRGDTSGNLKKQIAKVL
TEGYPTNKSDWLNGLTENEKIEVTQDAIWYFTETTVPADRSYTNRNVNSQ
KMKEVYQKLIDTTDIDKYEDVQFDLFVPQDTNLQAVISVEPVIESLPWTS
LKPIAQKDITAKKIWVDAPKEKPIIYFKLYRQLPGEKEVAVDDAELKQIN
SEGQQEISVTWTNQLVTDEKGMAYIYSVKEVDKNGELLEPKDYIKKEDGL
TVTNTYVKPTSGHYDIEVTFGNGHIDITEDTTPDIVSGENQMKQIEGEDS
KPIDEVTENNLIEFGKNTMPGEEDGTNSNKYEEVEDSRPVDTLSGLSSEQ
GQSGDMTIEEDSATHIKFSKRDIDGKELAGATMELRDSSGKTISTWISDG
QVKDFYLMPGKYTFVETAAPDGYEIATAITFTVNEQGQVTVNGKATKGDA
HIVMVDAYKPTKGSGQVIDIEEKLPDEQGHSGSTTEIEDSKSSDVIIGGQ
GQIVETTEDTQTGMHGDSGCKTEVEDTKLVQSFHFDNKESESNSEIPKKD
KPKSNTSLPATGEKQHNMFFWMVTSCSLISSVFVISLKTKKRLSSC

[1105] SpyM18_{—}0132 contains an amino acid motif indicative of a cell wall anchor: SEQ ID NO:180 LPATG (shown in italics in SEQ ID NO:79, above). In some recombinant host cell systems, it may be preferable to remove this motif to facilitate secretion of a recombinant SpyM18_{—}0132 protein from the host cell. Alternatively, in other recombinant host cell systems, it may be preferable to use the cell wall anchor motif to anchor the recombinantly expressed protein to the cell wall. The extracellular domain of the expressed protein may be cleaved during purification or the recombinant protein may be left attached to either inactivated host cells or cell membranes in the final composition.

[1106] A pilin motif, discussed above, containing a conserved lysine (K) residue has also been identified in SpyM18_{—}0132. The pilin motif sequence is underlined in SEQ ID NO:79, below. A conserved lysine (K) residue is also marked in bold, at amino acid residue 270. The pilin sequence, in particular the conserved lysine residue, is thought to be important for the formation of oligomeric, pilus-like structures. Preferred fragments of SpyM18_{—}0132 include the conserved lysine residue. Preferably, fragments include the pilin sequence.

SEQ ID NO: 79

MTQKNSYKLSFLLSLTGFILGLLLVFIGLSGVSVGHAETRNGANKQGAFE
IKKNKSQEEYNYEVYDNRNILQDGEHKLEIKRVDGTGKTYQGFCFQLTKN
FPTAQGVSKKLYKKLSSSDEETLKQYASKYTSNRRGDTSGNLKKQIAKVL
TEGYPTNKSDWLNGLTENEKIEVTQDAIWYFTETTVPADRSYTNRNVNSQ
KMKEVYQKLIDTTDIDKYEDVQFDLFVPQDTNLQAVISVEPVIESLPWTS
LKPIAQKDITAKKIWVDAPKEKPIIYFKLYRQLPGEKEVAVDDAELKQIN
SEGQQEISVTWTNQLVTDEKGMAYIYSVKEVDKNGELLEPKDYIKKEDGL
TVTNTYVKPTSGHYDIEVTFGNGHIDITEDTTPDIVSGENQMKQIEGEDS
KPIDEVTENNLIEFGKNTMPGEEDGTNSNKYEEVEDSRPVDTLSGLSSEQ
GQSGDMTIEEDSATHIKFSKRDIDGKELAGATMELRDSSGKTISTWISDG
QVKDFYLMPGKYTFVETAAPDGYEIATAITFTVNEQGQVTVNGKATKGDA
HIVMVDAYKPTKGSGQVIDIEEKLPDEQGHSGSTTEIEDSKSSDVIIGGQ
GQIVETTEDTQTGMHGDSGCKTEVEDTKLVQSFHFDNKESESNSEIPKKD
KPKSNTSLPATGEKQHNMFFWMVTSCLISSVFVISLKTKKRLSSC

[1107] An E box containing a conserved glutamic residue has been identified in SpyM18_{—}0132. The E-box motif is underlined in SEQ ID NO:79, below. The conserved glutamic acid (E), at amino acid residue 516, is marked in bold. The E box motif, in particular the conserved glutamic acid residue, is thought to be important for the formation of oligomeric pilus-like structures of SpyM18_{—}0132. Preferred fragments of SpyM18_{—}0132 include the conserved glutamic acid residue. Preferably, fragments include the E box motif.

SEQ ID NO: 79

MTQKNSYKLSFLLSLTGFILGLLLVFIGLSGVSVGHAETRNGANKQGAFE
IKKNKSQEEYNYEVYDNRNILQDGEHKLEIKRVDGTGKTYQGFCFQLTKN
FPTAQGVSKKLYKKLSSSDEETLKQYASKYTSNRRGDTSGNLKKQIAKVL
TEGYPTNKSDWLNGLTENEKIEVTQDAIWYFTETTVPADRSYTNRNVNSQ
KMKEVYQKLIDTTDIDKYEDVQFDLFVPQDTNLQAVISVEPVIESLPWTS
LKPIAQKDITAKKIWVDAPKEKPIIYFKLYRQLPGEKEVAVDDAELKQIN
SEGQQEISVTWTNQLVTDEKGMAYIYSVKEVDKNGELLEPKDYIKKEDGL
TVTNTYVKPTSGHYDIEVTFGNGHIDITEDTTPDIVSGENQMKQIEGEDS
KPIDEVTENNLIEFGKNTMPGEEDGTNSNKYEEVEDSRPVDTLSGLSSEQ
GQSGDMTIEEDSATHIKFSKRDIDGKELAGATMELRDSSGKTISTWISDG
QVKDFYLMPGKYTFVETAAPDGYEIATAITFTVNEQGQVTVNGKATKGDA
HIVMVDAYKPTKGSGQVIDIEEKLPDEQGHSGSTTEIEDSKSSDVIIGGQ
GQIVETTEDTQTGMHGDSGCKTEVEDTKLVQSFHFDNKESESNSEIPKKD
KPKSNTSLPATGEKQHNMFFWMVTSCSLISSVFVISLKTKKRLSSC

[1108] Examples of GAS AI-3 sequences from M49 strain isolate 591 are set forth below.

[1109] SpyoM01000156 is a negative transcriptional regulator (Nra). An example of SpyoM01000156 is set forth in SEQ ID NO:243.

SEQ ID NO: 243

MPYVKKKKDSFLVETYLEQSIRDKSELVLLLFKSPTIIFSHVAKQTGLTA
VQLKYYCKELDDFFGNNLDITIKKGKIICCFVKPVKEFYLHQLYDTSTIL
KLLVFFIKNGTSSQPLIKFSKKYFLSSSSAYRLRESLIKLLREFGLRVSK
NTIVGEEYRIRYLIAMLYSKFGIVIYPLDHLDNQIIYRFLSQSATNLRTS
PWLEEPFSFYNMLLALSWKRHQFAVSIPQTRIFRQLKKLFIYDCLTRSSR
QVIENAFSLTFSQGDLDYLFLIYITTNNSFASLQWTPQHIETCCHIFEKN
DTFRLLLEPILKRLPQLNHSKQDLIKALMYFSKSFLFNLQHFVIEIPSFS
LPTYTGNSNLYKALKNIVNQWLAQLPGKRHLNEKHLQLFCSHIEQILKNK
QPALTVVLISSNFINAKLLTDTIPRYFSDKGIHFYSFYLLRDDIYQIPSL
KPDLVITHSRLIPFVKNDLVKGVTVAEFSFDNPDYSIASIQNLIYQLKDK
KYQDFLNEQLQ

[1110] SpyoM01000155 is thought to be a collagen binding protein (CPA). An example of SpyoM01000155 is set forth in SEQ ID NO:244.

SEQ ID NO: 244

MQKRDKTNYGSANNKRRQTTIGLLKVFLTFVALIGIVGFSIRAFGAEEQS
VPNRQSSIQDYPWYGYDSYPKGYPDYSPLKTYHNLKVNLEGSKDYQAYCF
NLTKHFPSKSDSVRSQWYKKLEGTNENFIKLADKPRIEDGQLQQNILRIL
YNGYPNNRNGIMKGIDPLNAILVTQNAIWYYTDSAQINPDESFKTEARSN
GINDQQLGLMRKALKELIDPNLGSKYSNKTPSGYRLNVFESHDKTFQNLL
SAEYVPDTPPKPGEEPPAKTEKTSVIIRKYAEGDYSKLLEGATLKLSQIE
GSGFQEKDFQSNSLGETVELPNGTYTLTETSSPDGYKIAEPIKFRVENKK
VFIVQKDGSQVENPNKEVAEPYSVEAYNDFMDEEVLSGFTPYGKFYYAKN
KDKSSQVVYCFNADLHSPPDSYDSGETINPDTSTMKEVKYTHTAGSDLFK
YALRPRDTNPEDFLKHIKKVIEKGYKKKGDSYNGLTETQFRAATQLAIYY
FTDSADLKTLKTYNNGKGYHGFESMDEKTLAVTKELITYAQNGSAPQLTN
LDFFVPNNSKYQSLIGTEYHPDDLVDVIRMEDKKQEVIPVTHSLTVKKTV
VGELGDKTKGFQFELELKDKTGQPIVNTLKTNNQDLVAKDGKYSFNLKHG
DTIRIEGLPTGYSYTLKETEAKDYIVTVDNKVSQEAQSVGKDITEDKKVT
FENRKDLVPPTGLTTDGAIYLWLLLLVPLGLLVWLFGRKGLKND

[1111] SpyoM01000155 contains an amino acid motif indicative of a cell wall anchor: SEQ ID NO:184 VPPTG (shown in italics in SEQ ID NO:244, above). In some recombinant host cell systems, it may be preferable to remove this motif to facilitate secretion of a recombinant SpyoM01000155 protein from the host cell. Alternatively, in other recombinant host cell systems, it may be preferable to use the cell wall anchor motif to anchor the recombinantly expressed protein to the cell wall. The extracellular domain of the expressed protein may be cleaved during purification or the recombinant protein may be left attached to either inactivated host cells or cell membranes in the final composition.

[1112] Two pilin motifs, discussed above, containing conserved lysine (K) residues have also been identified in SpyoM01000155. The pilin motif sequence is underlined in SEQ ID NO:244, below. Conserved lysine (K) residues are also marked in bold, at amino acid residues 71 and 261. The pilin sequences, in particular the conserved lysine residues, are thought to be important for the formation of oligomeric, pilus-like structures. Preferred fragments of SpyoM01000155 include at least one conserved lysine residue. Preferably, fragments include at least one pilin sequence.

SEQ ID NO: 244

MQKRDKTNYGSANNKRRQTTIGLLKVFLTFVALIGIVGFSIRAFGAEEQS
VPNRQSSIQDYPWYGYDSYPKGYPDYSPLKTYHNLKVNLEGSKDYQAYCF
NLTKHFPSKSDSVRSQWYKKLEGTNENFIKLADKPRIEDGQLQQNILRIL
YNGYPNNRNGIMKGIDPLNAILVTQNAIWYYTDSAQINPDESFKTEARSN
GINDQQLGLMRKALKELIDPNLGSKYSNKTPSGYRLNVFESHDKTFQNLL
SAEYVPDTPPKPGEEPPAKTEKTSVIIRKYAEGDYSKLLEGATLKLSQIE
GSGFQEKDFQSNSLGETVELPNGTYTLTETSSPDGYKIAEPIKFRVENKK
VFIVQKDGSQVENPNKEVAEPYSVEAYNDFMDEEVLSGFTPYGKFYYAKN
KDKSSQVVYCFNADLHSPPDSYDSGETINPDTSTMKEVKYTHTAGSDLFK
YALRPRDTNPEDFLKHIKKVIEKGYKKKGDSYNGLTETQFRAATQLAIYY
FTDSADLKTLKTYNNGKGYHGFESMDEKTLAVTKELITYAQNGSAPQLTN
LDFFVPNNSKYQSLIGTEYHPDDLVDVIRMEDKKQEVIPVTHSLTVKKTV
VGELGDKTKGFQFELELKDKTGQPIVNTLKTNNQDLVAKDGKYSFNLKHG
DTIRIEGLPTGYSYTLKETEAKDYIVTVDNKVSQEAQSVGKDITEDKKVT
FENRKDLVPPTGLTTDGAIYLWLLLLVPLGLLVWLFGRKGLKND

[1113] Two E boxes containing conserved glutamic residues have been identified in SpyoM01000155. The E-box motifs are underlined in SEQ ID NO:244, below. The conserved glutamic acid (E) residues, at amino acid residues 329 and 668, are marked in bold. The E box motifs, in particular the conserved glutamic acid residues, are thought to be important for the formation of oligomeric pilus-like structures of SpyoM01000155. Preferred fragments of SpyoM01000155 include at least one conserved glutamic acid residue. Preferably, fragments include at least one E box motif.

SEQ ID NO: 244

MQKRDKTNYGSANNKRRQTTIGLLKVFLTFVALIGIVGFSIRAFGAEEQS
VPNRQSSIQDYPWYGYDSYPKGYPDYSPLKTYHNLKVNLEGSKDYQAYCF
NLYKHFPSKSDSVRSQWYKKLEGTNENFIKLADKPRIEDGQLQQNILRIL
YNGYPNNRNGIMKGIDPLNAILVTQNAIWYYTDSAQINPDESFKTEARSN
GINDQQLGLMRKALKELIDPNLGSKYSNKTPSGYRLNVFESHDKTFQNLL
SAEYVPDTPPKPGEEPPAKTEKTSVIIRKYAEGDYSKLLEGATLKLSQIE
GSGFQEKDFQSNSLGETVELPNGTYTLTETSSPDGYKIAEPIKFRVENKK
VFIVQKDGSQVENPNKEVAEPYSVEAYNDFMDEEVLSGFTPYGKFYYAKN
KDKSSQVVYCFNADLHSPPDSYDSGETINPDTSTMKEVKYTHTAGSDLFK
YALFPRDTNPEDFLKHIKKVIEKGYKKKGDSYNGLTETQFRAATQLAIYY
FTDSADLKTLKTYNNGKGYHGFESMDEKTLAVTKELITYAQNGSAPQLTN
LDFFVPNNSKYQSLIGTEYHPDDLVDVIRMEDKKQEVIPVTHSLTVKKTV
VGELGDKTKGFQFELELKDKTGQPIVNTLKTNNQDLVAKDGKYSFNLKHG
DTIRIEGLPTGYSYTLKETEAKDYIVTVDNKVSQEAQSVGKDITEDKKVT
FENRKDLVPPTGLTTDGAIYLWLLLLVPLGLLVWLFGRKGLKND

[1114] SpyoM01000154 is a LepA protein. An example of SpyoM01000154 is shown in SEQ ID NO:245.

SEQ ID NO: 245

MTNYLNRLNENSLFKAFIRLVLKISIIGFLGYILFQYVFGVMIINTNDMS
PALSAGDGVLYYRLADRSHINDVVVYEVDNTLKVGRIAAQAGDEVNGTQE
GGLLINGHPPEKEVPYLTYPHSSGPNFPYKVPTGTYFILNDYREERLDSR
YYGALPINQIKGKISTLLRVRGI

[1115] SpyoM01000153 is thought to be a fimbrial protein. An example of SpyoM01000153 is shown in SEQ ID NO:246.

SEQ ID NO: 246

NKKNKLLLATAILATALGMASMSQNIKAETAGVIDGSTLVVKKTFPSYTD
DNVLMPKADYSFKVEADDNAKGKTKDGLDIKPGVIDGLENTKTIRYSNSD
KITAKEKSVNFEFANVKFPGVGVYRYTVAEVNGNKAGITYDSQQWTVDVY
VVNKEGGGFEVKYIVSTEVGQSEKKPVLFKNSFDTTSLKIEKQVTGNTGE
HQRLFSFTLLLTPNECFEKGQVVNILQGGETKKVVIGEEYSFTLKDKESV
TLSQLPVGIEYKLTEEDVTKDGYKTSATLKDGEQSSTYELGKDHKTDKSA
DEIVVTNKRDTQVPTGVVGTLAPFAVLSIVAIGGVIYITKRKKA

[1116] SpyoM01000153 contains an amino acid motif indicative of a cell wall anchor: SEQ ID NO:140 QVPTG (shown in italics in SEQ ID NO:246, above). In some recombinant host cell systems, it may be preferable to remove this motif to facilitate secretion of a recombinant SpyoM01000153 protein from the host cell. Alternatively, in other recombinant host cell systems, it may be preferable to use the cell wall anchor motif to anchor the recombinantly expressed protein to the cell wall. The extracellular domain of the expressed protein may be cleaved during purification or the recombinant protein may be left attached to either inactivated host cells or cell membranes in the final composition.

[1117] A pilin motif, discussed above, containing a conserved lysine (K) residue has also been identified in SpyoM01000153. The pilin motif sequence is underlined in SEQ ID NO:246, below. A conserved lysine (K) residue is also marked in bold, at amino acid residue 57. The pilin sequence, in particular the conserved lysine residue, is thought to be important for the formation of oligomeric, pilus-like structures. Preferred fragments of SpyoM01000153 include the conserved lysine residue. Preferably, fragments include the pilin sequence.

SEQ ID NO: 246

MKKNKLLLATAILATALGMASMSQNIKAETAGVIDGSTLVVKKTFPSYTD
DNVLMPKADYSFKVEADDNAKGKTKDGLDIKPGVIDGLENTKTIRYSNSD
KITAKEKSVNFEFANVKFPGVGVYRYTVAEVNGNKAGITYDSQQWTVDVY
VVNKEGGGFEVKYIVSTEVGQSEKKPVLFKNSFDTTSLKIEKQVTGNTGE
HQRLFSFTLLLTPNECFEKGQVVNILQGGETKKVVIGEEYSFTLKDKESV
TLSQLPVGIEYKLTEEDVTKDGYKTSATLKDGEQSSTYELGKDHKTDKSA
DEIVVTNKRDTQVPTGVVGTLAPFAVLSIVAIGGVIYITKRKKA

[1118] An E box containing a conserved glutamic residue has been identified in SpyoM01000153. The E-box motif is underlined in SEQ ID NO:246, below. The conserved glutamic acid (E), at amino acid residue 265, is marked in bold. The E box motif, in particular the conserved glutamic acid residue, is thought to be important for the formation of oligomeric pilus-like structures of SpyoM01000153. Preferred fragments of SpyoM01000153 include the conserved glutamic acid residue. Preferably, fragments include the E box motif.

SEQ ID NO: 246

MKKNKLLLATAILATALGMASMSQNIKAETAGVIDGSTLVVKKTFPSYTD
DNVLMPKADYSFKVEADDNAKGKTKDGLDIKPGVIDGLENTKTIRYSNSD
KITAKEKSVNFEFANVKFPGVGVYRYTVAEVNGNKAGITYDSQQWTVDVY
VVNKEGGGFEVKYIVSTEVGQSEKKPVLFKNSFDTTSLKIEKQVTGNTGE
HQRLFSFTLLLTPNECFEKGQVVNILQGGETKKVVIGEEYSFTLKDKESV
TLSQLPVGIEYKLTEEDVTKDGYKTSATLKDGEQSSTYELGKDHKTDKSA
DEIVVTNKRDTQVPTGVVGTLAPFAVLSIVAIGGVIYITKRKKA

[1119] SpyoM01000152 is a SrtC2 type sortase. An example of SpyoM01000152 is shown in SEQ ID NO:247

SEQ ID NO: 247

MMMTIVQVINKAIDTLILIFCLVVLFLAGFGLWDSYHLYQQADASNFKKF
KTAQQQPKFEDLLALNEDVIGWLNIPGTHIDYPLVQGKTNLEYINKAVDG
SVAMSGSLFLDTRNHNDFTDDYSLIYGHHMAGNAMFGEIPKFLKKNFFNK
HNKAIIETKERKKLTVTIFACLKTDAFDQLVFNPNAITNQDQQRQLVDYI
SKRSKQFKPVKLKHHTKFVAFSTCENFSTDNRVIVVGTIQE

[1120] SpyoM01000151 is referred to as a hypothetical protein. An example of SpyoM01000151 is shown in SEQ ID NO:248.

SEQ ID NO: 248

MLFSVVMMLTMLAFNQTVLAKDSTVQTSISVENVLERAGDSTPFSAILES
IDAMKTIEEITIAGSGKASFSPLTFTTVGQYTYRVYQKPSQNKDYQADTT
VFDVLVYVTYDEDGTLVAKVISRRAGDEEKSAITFKPKRLVKPIPPRQPD
IPKTPLPLAGEVKSLLGILSIVLLGLLVLLYVKKLKSRL

[1121] SpyoM01000151 contains an amino acid motif indicative of a cell wall anchor: SEQ ID NO:185 LPLAG (shown in italics in SEQ ID NO:248, above). In some recombinant host cell systems, it may be preferable to remove this motif to facilitate secretion of a recombinant SpyoM01000151 protein from the host cell. Alternatively, in other recombinant host cell systems, it may be preferable to use the cell wall anchor motif to anchor the recombinantly expressed protein to the cell wall. The extracellular domain of the expressed protein may be cleaved during purification or the recombinant protein may be left attached to either inactivated host cells or cell membranes in the final composition.

[1122] A pilin motif, discussed above, containing a conserved lysine (K) residue has also been identified in SpyoM01000151. The pilin motif sequence is underlined in SEQ ID NO:248, below. Conserved lysine (K) residues are also marked in bold, at amino acid residue 138. The pilin sequence, in particular the conserved lysine residue, is thought to be important for the formation of oligomeric, pilus-like structures. Preferred fragments of SpyoM01000151 include the conserved lysine residue. Preferably, fragments include the pilin sequence.

SEQ ID NO: 248

MLFSVVMMLTMLAFNQTVLAKDSTVQTSISVENVLERAGDSTPFSIALES
IDAMKTIEEITIAGSGKASFSPLTFTTVGQYTYRVYQKPSQNKDYQADTT
VFDVLVYVTYDEDGTLVAKVISRRAGDEEKSAITFKPKRLVKPIPPRQPD
IPKTPLPLAGEVKSLLGILSIVLLGLLVLLYVKKLKSRL

[1123] Two E boxes containing conserved glutamic residues have been identified in SpyoM01000151. The E-box motifs are underlined in SEQ ID NO:248, below. The conserved glutamic acid (E) residues, at amino acid residues 58 and 128, are marked in bold. The E box motifs, in particular the conserved glutamic acid residues, are thought to be important for the formation of oligomeric pilus-like structures of SpyoM01000151. Preferred fragments of SpyoM01000151 include at least one conserved glutamic acid residue. Preferably, fragments include at least one E box motif.

SEQ ID NO: 248

MLFSVVMMLTMLAFNQTVLAKDSTVQTSISVENVLERAGDSTPFSIALES
IDAMKTIEEITIAGSGKASFSPLTFTTVGQYTYRVYQKPSQNKDYQADTT
VFDVLVYVTYDEDGTLVAKVISRRAGDEEKSAITFKPKRLVKPIPPRQPD
IPKTPLPLAGEVKSLLGILSIVLLGLLVLLYVKKLKSRL

[1124] SpyoM01000150 is referred to as a putative MsmRL. An example of SpyoM01000150 is set forth in SEQ ID NO:249.

SEQ ID NO: 249

MVIFDLKHVQTLHSLSQLPISVMSQDKALIQVYGNDDYLLCYYQFLKHLA
IPQAAQDVIFYEGLFEESFMIFPLCHYIIAIGPFYPYSLNKDYQEQLANN
FLKHSSHRSKEELLSYMALVPHFPINNVRNLLIAIDAFFDTQFETTCQQT
IHQLLQHSKQMTADPDIIHRLKHISKASSQLPPVLEHLNHIMDLVKLGNP
QLLKQEINRIPLSSITSSSISALRAEKNLTVIYLTRLLEFSFVENTDVAK
HYSLVKYYMALNEEASDLLKVLRIRCAAIIHFSESLTNKSISDKRQMYNS
VHLYVDSHLYSKLKVSDIAKRLYVSESHLRSVFKKYSNVSLQHYILSTKI
KEAQLLLKRGIPVGEVAKSLYFYDTTHFHKIFKKYTGISSKDYLAKYRDN
I

[1125] SpyoM01000149 is a F2 like fibronectin-binding protein. An example of SpyoM01000149 is set forth in SEQ ID NO:250.

SEQ ID NO: 250

MTQKNSYKLSFLLSLTGFILGLLLVFIGLSGVSVGHAETRNGANKQGYFE
IKKVDQNNKPLSGATFSLTPKDGKGKPVQTFTSSEEGIIDAQNLQPGTYT
LKEETAPDGYDKTSRTWTVTVYENGYTKLVENPYNGEIISKAGSKDVSSS
LQLENPKMSVVSKYGEQEKTSNSADFYRNHAAYFKMSFELKQKDKSETIN
PGDTFVLQLDRRLNPKGISQDIPKIIYDSENSPLAIGKYDAKTHQLTYTF
TNYIAGLDKVQLSAELSLFLENKEVLENTNISDFKSTIGGQEITYKGTVN
VLYGNESTKESNYITNGLSNVGGSIESYNTETGEFVWYVYVNPNRTNIPY
AVLNLWGFAKRTAQGENDNSSVSSAQLTGYDIYEVPHNYRLPTSYGVDIS
RLNLRKDLEAKLPQGSTQGANKRLRIDFGENLQGKAFVVKVTGKADQSGK
ELIVQSHLSSFNNWGSYKTLRPNSHVSFTNEIALSPSKGSGSGTSEFTKP
AITVANLKRVAQLRFKKVSTDNVPLPEAAFELRSSNGNSQKLEASSNTQG
EIHFKDLTSGTYDLYETKAPKGYQQVTEKLATVTVDTTKPAEQMVKWEKP
HSFVKVEANKEVTIVNHKETLTFSGKKIWENDRPDQRPAKIQVQLLQNGQ
KMPNQIQEVTKDNDWSYHFKDLPKYDAKNQEYKYSVEEVKVPDGYKVSYL
GNDIFNTRETEFVFEQNNFNLEFGNAEIKGQSGSKIIDEDTLTSFKGKKI
WKNDTAENRPQAIQVQLYADGVAVEGQTKFISGSGNEWSFEFKNLKKYNG
TGNDIIYSVKEVTVPTGYDVTYSANDIINTKREVITQQGPNLEIEETLPL
ESGASGGTTTVEDSRSVDTLSGLSSEQGQSGDMTIEEDSATHIKFSKRDI
DGKELAGATMELRDSSGKTISTWISDGQVKDFYLMPGKYTFVETAAPDGY
EIATAITFTVNEQGQVTVNGKATKGDAHIVMVDAYKPTKGSGQVIDIEEK
LPDEQGHSGSTTEIEDSKPSDVIIGGQGEVVDTTEDTQSGMTGHSGSTTE
IEDSKSSDVIIGGQGQVVETTEDTQTGMHGDSGCKTEVEDTKLVQFFHFD
NKEPESNSEIPKKDKPKSNTSLPATGEKQHNKFFWMVTSCSLISSVKVIS
LKSKKRLLSC

[1126] SpyoM01000149 contains an amino acid motif indicative of a cell wall anchor: SEQ ID NO:180 LPATG (shown in italics in SEQ ID NO:250, above). In some recombinant host cell systems, it may be preferable to remove this motif to facilitate secretion of a recombinant SpyoM01000149 protein from the host cell. Alternatively, in other recombinant host cell systems, it may be preferable to use the cell wall anchor motif to anchor the recombinantly expressed protein to the cell wall. The extracellular domain of the expressed protein may be cleaved during purification or the recombinant protein may be left attached to either inactivated host cells or cell membranes in the final composition.

[1127] Two pilin motifs, discussed above, containing conserved lysine (K) residues have also been identified in SpyoM01000149. The pilin motif sequences are underlined in SEQ ID NO:250, below. Conserved lysine (K) residues are also marked in bold, at amino acid residues 157 and 163, and 216 and 224. The pilin sequences, in particular the conserved lysine residues, are thought to be important for the formation of oligomeric, pilus-like structures. Preferred fragments of SpyoM01000149 include at least one conserved lysine residue. Preferably, fragments include at least one pilin sequence.

SEQ ID NO: 250

MTQKNSYKLSFLLSLTGFILGLLLVFIGLSGVSVGHAETRNGANKQGYFE
IKKVDQNNKPLSGATFSLTPKDGKGKPVQTFTSSEEGIIDAQNLQPGTYT
LKEETAPDGYDKTSRTWTVTVYENGYTKLVENPYNGEIISKAGSKDVSSS
LQLENPKMSVVSKYGEQEKTSNSADFYRNHAAYFKMSFELKQKDKSETIN
PGDTFVLQLDRRLNPKGISQDIPKIIYDSENSPLAIGKYDAKTHQLTYTF
TNYIAGLDKVQLSAELSLFLENKEVLENTNISDFKSTIGGQEITYKGTVN
VLYGNESTKESNYITNGLSNVGGSIESYNTETGEFVWYVYVNPNRTNIPY
AVLNLWGFAKRTAQGENDNSSVSSAQLTGYDIYEVPHNYRLPTSYGVDIS
RLNLRKDLEAKLPQGSTQGANKRLRIDFGENLQGKAFVVKVTGKADQSGK
ELIVQSHLSSFNNWGSYKTLRPNSHVSFTNEIALSPSKGSGSGTSEFTKP
AITVANLKRVAQLRFKKVSTDNVPLPEAAFELRSSNGNSQKLEASSNTQG
EIHFKDLTSGTYDLYETKAPKGYQQVTEKLATVTVDTTKPAEQMVKWEKP
HSFVKVEANKEVTIVNHKETLTFSGKKIWENDRPDQRPAKIQVQLLQNGQ
KMPNQIQEVTKDNDWSYHFKDLPKYDAKNQEYKYSVEEVKVPDGYKVSYL
GNDIFNTRETEFVFEQNNFNLEFGNAEIKGQSGSKIIDEDTLTSFKGKKI
WKNDTAENRPQAIQVQLYADGVAVEGQTKFISGSGNEWSFEFKNLKKYNG
TGNDIIYSVKEVTVPTGYDVTYSANDIINTKREVITQQGPNLEIEETLPL
ESGASGGTTTVEDSRSVDTLSGLSSEQGQSGDMTIEEDSATHIKFSKRDI
DGKELAGATMELRDSSGKTISTWISDGQVKDFYLMPGKYTFVETAAPDGY
EIATAITFTVNEQGQVTVNGKATKGDAHIVMVDAYKPTKGSGQVIDIEEK
LPDEQGHSGSTTEIEDSKPSDVIIGGQGEVVDTTEDTQSGMTGHSGSTTE
IEDSKSSDVIIGGQGQVVETTEDTQTGMHGDSGCKTEVEDTKLVQFFHFD
NKEPESNSEIPKKDKPKSNTSLPATGEKQHNKFFWMVTSCSLISSVFVIS
LKSKKRLLSC

[1128] Two E boxes containing conserved glutamic residues have been identified in SpyoM01000149. The E-box motifs are underlined in SEQ ID NO:250, below. The conserved glutamic acid (E) residues, at amino acid residues 329 and 668, are marked in bold. The E box motifs, in particular the conserved glutamic acid residues, are thought to be important for the formation of oligomeric pilus-like structures of SpyoM01000149. Preferred fragments of SpyoM01000149 include at least one conserved glutamic acid residue. Preferably, fragments include at least one E box motif.

SEQ ID NO: 250

MTQKNSYKLSFLLSLTGFILGLLLVFIGLSGVSVGHAETRNGANKQGYFE
IKKVDQNNKPLSGATFSLTPKDGKGKPVQTFTSSEEGIIDAQNLQPGTYT
LKEETAPDGYDKTSRTWTVTVYENGYTKLVENPYNGEIISKAGSKDVSSS
LQLENPKMSVVSKYGEQEKTSNSADFYRNHAAYFKMSFELKQKDKSETIN
PGDTFVLQLDRRLNPKGISQDIPKIIYDSENSPLAIGKYDAKTHQLTYTF
TNYIAGLDKVQLSAELSLFLENKEVLENTNISDFKSTIGGQEITYKGTVN
VLYGNESTKESNYITNGLSNVGGSIESYNTETGEFVWYVYVNPNRTNIPY
AVLNLWGFAKRTAQGENDNSSVSSAQLTGYDIYEVPHNYRLPTSYGVDIS
RLNLRKDLEAKLPQGSTQGANKRLRIDFGENLQGKAFVVKVTGKADQSGK
ELIVQSHLSSFNNWGSYKTLRPNSHVSFTNEIALSPSKGSGSGTSEFTKP
AITVANLKRVAQLRFKKVSTDNVPLPEAAFELRSSNGNSQKLEASSNTQG
EIHFKDLTSGTYDLYETKAPKGYQQVTEKLATVTVDTTKPAEQMVKWEKP
HSFVKVEANKEVTIVNHKETLTFSGKKIWENDRPDQRPAKIQVQLLQNGQ
KMPNQIQEVTKDNDWSYHFKDLPKYDAKNQEYKYSVEEVKVPDGYKVSYL
GNDIFNTRETEFVFEQNNFNLEFGNAEIKGQSGSKIIDEDTLTSFKGKKI
WKNDTAENRPQAIQVQLYADGVAVEGQTKFISGSGNEWSFEFKNLKKYNG
TGNDIIYSVKEVTVPTGYDVTYSANDIINTKREVITQQGPNLEIEETLPL
ESGASGGTTTVEDSRSVDTLSGLSSEQGQSGDMTIEEDSATHIKFSKRDI
DGKELAGATMELRDSSGKTISTWISDGQVKDFYLMPGKYTFVETAAPDGY
EIATAITFTVNEQGQVTVNGKATKGDAHIVMVDAYKPTKGSGQVIDIEEK
LPDEQGHSGSTTEIEDSKPSDVIIGGQGEVVDTTEDTQSGMTGHSGSTTE
IEDSKSSDVIIGGQGQVVETTEDTQTGMHGDSGCKTEVEDTKLVQFFHFD
NKEPESNSEIPKKDKPKSNTSLPATGEKQHNKFFWMVTSCSLISSVFVIS
LKSKKRLLSC

[1129] As discussed above, applicants have also determined the nucleotide and encoded amino acid sequence of fimbrial structural subunits in several other GAS AI-3 strains of bacteria. Examples of sequences of these fimbrial structural subunits are set forth below.

[1130] M3 strain isolate ISS 3040 is a GAS AI-3 strain of bacteria. ISS3040_fimbrial is thought to be a fimbrial structural subunit of M3 strain isolate ISS 3040. An example of a nucleotide sequence encoding the ISS3040_fimbrial protein (SEQ ID NO:263) and an ISS3040_fimbrial protein amino acid sequence (SEQ ID NO:264) are set forth below.

SEQ ID NO: 263

GAGACGGCAGGAGTGTCCGAAAATGCAAAATTAATAGTAAAAAAGACATT
TGACTCTTATACAGACAATGAAGTTTTAATGCCAAAAGCTGATTATACTT
TTAAAGTAGAGGCAGATAGTACAGCTAGTGGCAAAACGAAAGACGGTTTA
GAGATTAAGCCAGGTATTGTTAATGGTTTAACAGAACAGATTATCAGCTA
TACTAATACTGATAAACCAGATAGTAAAGTTAAAAGTACAGAGTTTGATT
TTTCAAAAGTAGTATTCCCTGGTATTGGTGTTTACCGCTATACTGTTTCA
GAAAAACAAGGTGATGTTGAAGGAATTACCTACGATACTAAGAAGTGGAC
AGTAGATGTTTATGTTGGAAACAAAGAAGGTGGTGGTTTTGAACCTAAGT
TTATTGTATCTAAGGAACAAGGAACAGACGTCAAAAAACCAGTTAATTTT
AACAACTCGTTTGCAACTACTTCGTTAAAAGTTAAGAAGAATGTATCGGG
GAATACTGGAGAATTGCAAAAAGAATTTGACTTTACATTGACGCTTAATG
AAAGCACGAATTTTAAAAAAGATCAAATTGTTTCTTTACAAAAAGGAAAC
GAGAAATTTGAAGTTAAGATTGGTACTCCCTACAAGTTTAAACTCAAAAA
TGGGGAATCTATTCAACTAGACAAGTTACCAGTTGGTATTACTTATAAAG
TCAATGAAATGGAAGCTAATAAAGATGGGTATAAAACAACAGCATCCTTG
AAAGAGGGAGATGGTCAATCTAAAATGTATCAATTGGATATGGAACAAAA
AACAGACGAATCTGCTGACGAAATCGTTGTCACAAATAAGCGTGACACTC
AAGTTCCAACTGGTGTTGTAGGCACCCTTGCTCCATTTGCAGTTCTTAGC

SEQ ID NO: 264

ETAGVSENAKLIVKKTFDSYTDNEVLMPKADYTKFVEADSTASGKTKDGL
EIKPGIVNGLTEQIISYTNTDKPDSKVKSTEFDFSKVVFPGIGVYRYTVS
EKQGDVEGITYDTKKWTVDVYVGNKEGGGFEPKFIVSKEQGTDVKKPVNF
NNSFATTSLKVKKNVSGNTGELQKEFDFTLTLNESTNFKKDQIVSLQKGN
EKFEVKIGTPYKFKLKNGESIQLDKLPVGITYKVNEMEANKDGYKTTASL
KEGDGQSKMYQLDMEQKTDESADEIVVTNKRDTQVPTGVVGTLAPFAVLS

[1131] M44 strain isolate ISS 3776 is a GAS AI-3 strain of bacteria. ISS3776_fimbrial is thought to be a fimbrial structural subunit of M44 isolate ISS 3776. An example of a nucleotide sequence encoding the ISS3776_fimbrial protein (SEQ ID NO:253) and an ISS3776_fimbrial protein amino acid sequence (SEQ ID NO:254) are set forth below.

SEQ ID NO: 253

ttggagagagaaaaaatgaaaaaaaacaaattattacttgctactgcaat
cttagcaactgctttaggaacagcttctttaaatcaaaacgtaaaagctg
agacggcaggggttgtaacaggaaaatcactacaagttacaaagacaatg
acttatgatgatgaagaggtgttaatgcccgaaaccgcctttacttttac
tatagagcctgatatgactgcaagtggaaaagaaggcagcctagatatta
aaaatggaattgtagaaggcttagacaaacaagtaacagtaaaatataag
aatacagataaaacatctcaaaaaactaaaatagcacaatttgatttttc
taaggttaaatttccagctataggtgtttaccgctatatggtttcagaga
aaaacgataaaaaagacggaattacgtacgatgataaaaagtggactgta
gatgtttatgttgggaataaggccaataacgaagaaggtttcgaagttct
atatattgtatcaaaagaaggtacttctagtactaaaaaaccaattgaat
ttacaaactctattaaaactacttccttaaaaattgaaaaacaaataact
ggcaatgcaggagatcgtaaaaaatcattcaacttcacattaacattaca
accaagtgaatattataaaactggatcagttgtgaaaatcgaacaggatg
gaagtaaaaaagatgtgacgataggaacgccttacaaatttactttggga
cacggtaagagtgtcatgttatcgaaattaccaattggtatcaattacta
tcttagtgaagacgaagcgaataaagacggctacactacaacggcaacat
taaaagaacaaggcaaagaaaagagttccgatttcactttgagtactcaa
aaccagaaaacagacgaatctgctgacgaaatcgttgtcacaaataagcg
tgacactcaagttccaactggtgttgtagggacccttgctccatttgcag
ttcttagcattgtggctattggtggagttatctatattacaaaacgtaaa
aaagcttaa

SEQ ID NO: 254

MEREKMKKNKLLLATAILATALGTASLNQNVKAETAGVVTGKSLQVTKTM
TYDDEEVLMPETAFTFTIEPDMTASGKEGSLDIKNGIVEGLDKQVTVKYK
NTDKTSQKTKIAQFDFSKVKFPAIGVYRYMVSEKNDKKDGITYDDKKWTV
DVYVGNKANNEEGFEVLYIVSKEGTSSTKKPIEFTNSIKTTSLKIEKQIT
GNAGDRKKSFNFTLTLQPSEYYKTGSVVKIEQDGSKKDVTIGTPYKFTLG
HGKSVMLSKLPIGINYYLSEDEANKDGYTTTATLKEQGKEKSSDFTLSTQ
NQKTDESADEIVVTNKRDTQVPTGVVGTLAPFAVLSIVAIGGVIYITKRK
KA

[1132] M77 strain isolate ISS4959 is a GAS AI-3 strain of bacteria. ISS4959_fimbrial is thought to be a fimbrial structural subunit of M77 strain ISS 4959. An example of a nucleotide sequence encoding the ISS4959_fimbrial protein (SEQ ID NO:271) and an ISS4959_fimbrial protein amino acid sequence (SEQ ID NO:272) are set forth below.

SEQ ID NO: 271

gtaacagtaaaatataagaatacagataaaacatctcaaaaaactaaaat
agcacaatttgatttttctaaggttaaatttccagctataggtgtttacc
gctatatggtttcagagaaaaacgataaaaaagacggaattacgtacgat
gataaaaagtggacngtagatgtttatgttgggaataaggccaataacga
agaaggtttcgaagttctatatattgtatcaaaagaaggtacttctagtn
ctaaaaaaccaattgaatttacaaactctattaaaactacttccttaaaa
attgaaaaacaaataactggcaatgcaggagatcgtaaaaaatcattcaa
cttcacattnacattacanccaagtgaatattataaaactggatcagttg
tgaaaatcgaacaggatggaagtaaaaaagatgtgacgataggaacgcct
tacaaatttactttgggacacggtaagagtgtcatgttatcgaaattncc
aattggtatcaattactatcttagtgaagacgaagcgaataaagacggnt
acactacancggcaacattaaaagaacaaggcaaagaaaagagttccgat
ttcactttgagtactcaaaaccagaaaacagacgaatctgctg

SEQ ID NO: 272

VTVKYKNTDKTSQKTKIAQFDFSKVKFPAIGVYRYMVSEKNDKKDGITYD
DKKWTVDVYVGNKANNEEGFEVLYIVSKEGTSSXKKPIEFTNSIKTTSLK
IEKQITGNAGDRKKSFNFTXTLXPSEYYKTGSVVKIEQDGSKKDVTIGTP
YKFTLGHGKSVMLSKXPIGINYYLSEDEANKDGYTTXATLKEQGKEKSSD
FTLSTQNQKTDESA

[1133] Examples of GAS AI-4 sequences from M12 strain isolate A735 are set forth below.

[1134] 19224133 is thought to be a RofA regulatory protein. An example of a nucleotide sequence encoding the RofA regulatory protein (SEQ ID NO:104) and a RofA regulatory protein amino acid sequence (SEQ ID NO:105) are set forth below.

SEQ ID NO: 104

ATGACCATCCAAAAAAGGATGATATCTTGCCAATTTACACATCCTTCTAA
AGAAACTTATCTTTACCAACTCTATGCATCATCTAATGTCTTACAATTAC
TAGCGTTTTTAATAAAAAATGGTTCCCACTCTCGTCCCCTTACGGATTTT
GCAAGAAGTCATTTTTTATCAAACTCCTCAGCTTATCGGATGCGCGAAGC
ATTGATTCCTTTATTAAGAAACTTTGAATTAAAACTCTCTAAGAACAAGA
TTGTCGGTGAGGAATATCGTATCCGTTACCTCATCGCTCTGCTATATAGT
AAGTTTGGCATTAAAGTTTATGACTTGACGCAGCAAGACAAAAACATTAT
TCATAGCTTTTTATCCCATAGTTCCACCCACCTTAAAACTTCTCCTTGGT
TATCGGAATCGTTTTCTTTCTATGACATTTTATTAGCTTTATCGTGGAAG
CGGCATCAATTTTCGGTAACTATTCCCCAAACCAGAATTTTTCAACAATT
AAAAAAACTTTTTGTCTACGATTCTTTGAAAAAAAGTAGCCGTGATATTA
TCGAAACTTACTGCCAACTAAACTTTTCAGCAGGAGATTTGGACTACCTC
TATTTAATTTATATCACCGCTAATAATTCTTTTGCGAGCTTACAATGGAC
ACCTGAGCATATCAGACAATGTTGTCAACTTTTTGAAGAAAATGATACTT
TTCGCCTGCTTTTAAATCCTATCATCACTCTTTTACCTAACCTAAAAGAG
CAAAAGGCTAGTTTAGTAAAAGCTCTTATGTTTTTTTCAAAATCATTCTT
GTTTAATCTGCAACATTTTATTCCTGAGACCAACTTATTCGTTTCTCCGT
ACTATAAAGGAAACCAAAAACTCTATACGTCCTTAAAGTTAATTGTCGAA
GAGTGGATGGCCAAACTTCCTGGTAAGCGTTACTTGAACCATAAGCATTT
TCATCTTTTTTGCCACTATGTCGAGCAAATTCTAAGAAATATCCAACCTC
CTTTAGTTGTTGTTTTCGTAGCCAGTAATTTTATCAATGCTCATCTCCTA
ACAGATTCTTTCCCAAGGTATTTCTCGGATAAAAGCATTGATTTTCATTC
CTATTATCTATTGCAAGATAATGTTTATCAAATTCCTGATTTAAAGCCAG
ATTTGGTCATCACTCACAGTCAACTGATTCCTTTTGTTCACCATGAACTT
ACAAAAGGAATTGCTGTTGCTGAAATATCTTTTGATGAATCGATTCTGTC
TATCCAAGAATTGATGTATCAAGTTAAAGAGGAAAAATTCCAAGCTGATT
TAACCAAACAATTAACATAA

SEQ ID NO: 105

MTIQKRMISCQFTHPSKETYLYQLYASSNVLQLLAFLIKNGSHSRPLTDF
ARSHFLSNSSAYRMREALIPLLRNFELKLSKNKIVGEEYRIRYLIALLYS
KFGIKVYDLTQQDKNIIHSFLSHSSTHLKTSPWLSESFSFYDILLALSWK
RHQFSVTIPQTRIFQQLKKLFVYDSLKKSSRDIIETYCQLNFSAGDLDYL
YLIYITANNSFASLQWTPEHIRQCCQLFEENDTFRLLLNPIITLLPNLKE
QKASLVKALMFFSKSFLFNLQHFIPETNLFVSPYYKGNQKLYTSLKLIVE
EWMAKLPGKRYLNHKHFHLFCHYVEQILRNIQPPLVVVFVASNFINAHLL
TDSFPRYFSDKSIDFHSYYLLQDNVYQIPDLKPDLVITHSQLIPFVHHEL
TKGIAVAEISFDESILSIQELMYQVKEEKFQADLTKQLT

[1135] 19224134 is thought to be a protein F fibronectin binding protein. An example of a nucleotide sequence encoding the protein F fibronectin binding protein (SEQ ID NO:106) and a protein F fibronectin binding protein amino acid sequence (SEQ ID NO:107) are set forth below.

SEQ ID NO: 106

ATGGTAAGCTCATATATGTTTGCGAGAGGAGAGAAAATGAATAACAAAAT
GTTTTTGAACAAAGAAGCCGGTTTTTTGGTACACACAAAAAGAAAAAGGC
GATTTGCTGTCACTTTAGTGGGAGTCTTTTTTCTGCTTTTGGCATGTGCG
GGTGCTATCGGTTTTGGTCAAGTAGCCTATGCTGCGGATGAGAAGACTGT
GCCGAATTTTAAAAGCCCAGATCCAGATTATCCCTGGTATGGTTATGATT
CGTATAGAGGAATATTTGCAAGATATCACAATTTAAAAGTAAATCTAAAA
GGAAGTAAGGAGTATCAAGCGTATTGTTTTAACCTAACAAAATACTTTCC
TCGCCCCACTTATAGTACTACAAATAATTTTTACAAGAAAATTGATGGGA
GTGGATCAGCGTTCAAATCTTATGCAGCGAATCCTAGGGTTTTAGATGAG
AATTTAGATAAATTAGAAAAAAATATACTGAATGTAATTTATAATGGATA
TAAAAGTAATGCAAATGGTTTTATGAATGGTATAGAAGATCTTAATGCTA
TACTAGTAACTCAAAACGCTATTTGGTACTATTCAGATAGTGCTCCATTA
AATGATGTTAATAAAATGTGGGAAAGAGAGGTTCGGAATGGGGAGATTAG
TGAGTCACAAGTTACTTTAATGCGTGAGGCATTGAAAAAACTAATTGATC
CCAATTTAGAAGCTACTGCAGCTAATAAAATCCCATCAGGATATCGTTTA
AATATCTTTAAGTCTGAAAATGAAGATTACCAAAATCTTTTAAGTGCTGA
ATATGTACCTGATGATCCCCCTAAACCTGGTGATACGTCAGAACATAATC
CTAAAACTCCCGAGTTGGATGGCACTCCAATTCCCGAGGACCCAAAACGT
CCAGATGAGAGTTCAGAACCTGCGCTTCCCCCATTAATGCCAGAGCTAGA
TGGTGAAGAAGTCCCAGAAGTTCCAAGCGAGAGCTTAGAACCTGCGCTTC
CCCCATTGATGCCAGAGCTAGATGGTGAAGAAGTCCCAGAAGTTCCAAGC
GAGAGCTTAGAACCTGCGCTTCCCCCATTGATGCCAGAGCTAGATGGTGA
AGAAGTCCCAGAAGTTCCAAGCGAGAGCTTAGAACCTGCGCTTCCCCCAT
TAATGCCAGAGCTAGATGGTGAAGAAGTCCCAGAAGTTCCAAGCGAGAGC
TTAGAACCTGCGCTTCCCCCATTGATGCCAGAGTTAGATGGTGAAGAAGT
CCCTGAAAAACCTAGTGTTGACTTACCTATTGAAGTTCCTCGTTATGAGT
TTAACAATAAAGACCAGTCACCTCTAGCGGGTGAGTCTGGTGAGACGGAG
TATATTACCGAAGTCTATGGAAATCAACAGAACCCTGTTGATATTGATAA
AAAACTTCCGAATGAAACAGGTTTTTCAGGAAATATGGTTGAGACAGAAG
ATACGAAAGAGCCAGAAGTGTTGATGGGAGGTCAAAGTGAGTCTGTTGAA
TTTACTAAAGACACTCAAACAGGCATGAGTGGTCAAACAACTCCTCAGGT
TGAGACAGAAGATACGAAAGAGCCAGAAGTGTTGATGGGAGGTCAAAGTG
AGTCTGTTGAATTTACTAAAGACACTCAAACAGGCATGAGTGGTCAAACA
ACTCCTCAGGTTGAGACAGAAGATACGAAAGAGCCAGGAGTGTTGATGGG
AGGCCAAAGTGAGTCTGTTGAATTTACTAAAGACACTCAAACAGGCATGA
GTGGTCAAACAACTCCTCAGGTTGAGACAGAAGACACGAAAGAGCCAGGA
GTGTTGATGGGAGGTCAAAGTGAGTCTGTTGAATTTACTAAAGACACTCA
AACAGGCATGAGCGGTTTCAGTGAAACAGTGACCATTGTTGAAGATACGC
GTCCGAAGTTAGTGTTCCATTTTGACAATAATGAGCCCAAAGTGGAAGAG
AATCGGGAAAAGCCTACAAAAAATATAACACCTATCCTTCCTGCAACAGG
AGATATTGAGAATGTTTTGGCCTTTCTTGGAATCCTTATTTTGTCAGTAC
TTTCTATTTTTAGCCTTTTAAAAAACAAACAAAACAATAAAGTCTGA

SEQ ID NO: 107

MVSSYMFARGEKMNNKMFLNKEAGFLVHTKRKRRFAVTLVGVFFLLLACA
GAIGFGQVAYAADEKTVPNFKSPDPDYPWYGYDSYRGIFARYHNLKVNLK
GSKEYQAYCFNLTKYFPRPTYSTTNNFYKKIDGSGSAFKSYAANPRVLDE
NLDKLEKNILNVIYNGYKSNANGFMNGIEDLNAILVTQNAIWYYSDSAPL
NDVNKMWEREVRNGEISESQVTLMREALKKLIDPNLEATAANKIPSGYRL
NIFKSENEDYQNLLSAEYVPDDPPKPGDTSEHNPKTPELDGTPIPEDPKR
PDESSEPALPPLMPELDGEEVPEVPSESLEPALPPLMPELDGEEVPEVPS
ESLEPALPPLMPELDGEEVPEVPSESLEPALPPLMPELDGEEVPEVPSES
LEPALPPLMPELDGEEVPEKPSVDLPIEVPRYEFNNKDQSPLAGESGETE
YITEVYGNQQNPVDIDKKLPNETGFSGNMVETEDTKEPEVLMGGQSESVE
FTKDTQTGMSGQTTPQVETEDTKEPEVLMGGQSESVEFTKDTQTGMSGQT
TPQVETEDTKEPGVLMGGQSESVEFTKDTQTGMSGQTTPQVETEDTKEPG
VLMGGQSESVEFTKDTQTGMSGFSETVTIVEDTRPKLVFHFDNNEPKVEE
NREKPTKNITPILPATGDIENVLAFLGILILSVLSIFSLLKNKQNNKV

[1136] 19224134 contains an amino acid motif indicative of a cell wall anchor: SEQ ID NO:181 LPATG (shown in italics in SEQ ID NO:107, above). In some recombinant host cell systems, it may be preferable to remove this motif to facilitate secretion of a recombinant 19224134 protein from the host cell. Alternatively, in other recombinant host cell systems, it may be preferable to use the cell wall anchor motif to anchor the recombinantly expressed protein to the cell wall. The extracellular domain of the expressed protein may be cleaved during purification or the recombinant protein may be left attached to either inactivated host cells or cell membranes in the final composition.

[1137] A pilin motif, discussed above, containing a conserved lysine (K) residue has also been identified in 19224134. The pilin motif sequence is underlined in SEQ ID NO:107, below. Conserved lysine (K) residues are also marked in bold, at amino acid residues 275, 285, and 299. The pilin sequence, in particular the conserved lysine residues, are thought to be important for the formation of oligomeric, pilus-like structures. Preferred fragments of 19224134 include at least one conserved lysine residue. Preferably, fragments include the pilin sequence.

SEQ ID NO: 107

MVSSYMFARGEKMNNKMFLNKEAGFLVHTKRKRRFAVTLVGVFFLLLACA
GAIGFGQVAYAADEKTVPNFKSPDPDYPWYGYDSYRGIFARYHNLKVNLK
GSKEYQAYCFNLTKYFPRPTYSTTNNFYKKIDGSGSAFKSYAANPRVLEN
LDKLEKNILNVIYNGYKSNANGFMNGIEDLNAILVTQNAIWYYSDSAPLN
DVNKMWEREVRNGEISESQVTLMREALKKLIDPNLEATAANKIPSGYRLN
IFKSENEDYQNLLSAEYVPDDPPKPGDTSEHNPKTPELDGTPIPEDPKRP
DESSEPALPPLMPELDGEEVPEVPSESLEPALPPLMPELDGEEVPEVPSE
SLEPALPPLMPELDGEEVPEVPSESLEPALPPLMPELDGEEVPEVPSESL
EPALPPLMPELDGEEVPEKPSVDLPIEVPRYEFNNKDQSPLAGESGETEY
ITEVYGNQQNPVDIDKKLPNETGFSGNMVETEDTKEPEVLMGGQSESVEF
TKDTQTGMSGQTTPQVETEDTKEPEVLMGGQSESVEFTKDTQTGMSGQTT
PQVETEDTKEPGVLMGGQSESVEFTKDTQTGMSGQTTPQVETEDTKEPGV
LMGGQSESVEFTKDTQTGMSGFSETVTIVEDTRFKLVFHFDNNEPKVEEN
REKPTKNITPILPATGDIENVLAFLGILILSVLSIFSLLKNKQNNKV

[1138] Two E boxes containing conserved glutamic residues have been identified in 19224134. The E-box motifs are underlined in SEQ ID NO:107, below. The conserved glutamic acid (E) residues, at amino acid residues 487 and 524, are marked in bold. The E box motifs, in particular the conserved glutamic acid residues, are thought to be important for the formation of oligomeric pilus-like structures of 19224134. Preferred fragments of 19224134 include at least one conserved glutamic acid residue. Preferably, fragments include at least one E box motif.

SEQ ID NO: 107

MVSSYMFARGEKMNNKMFLNKEAGFLVHTKRKRRFAVTLVGVFFLLLACA
GATGFGQVAYAADEKTVPNFKSPDPDYPWYGYDSYRGIFARYHNLKVNLK
GSKEYQAYCFNLTKYFPRPTYSTTNNFYKKIDGSGSAFKSYAANPRVLDE
NLDKLEKNILNVIYNGYKSNANGFMNGIEDLNAILVTQNAIWYYSDSAPL
NDVNKMWEREVRNGEISESQVTLMREALKKLIDPNLEATAANKIPSGYRL
NIFKSENEDYQNLLSAEYVPDDPPKPGDTSEHNPKTPELDGTPIPEDPKR
PDESSEPALPPLMPELDGEEVPEVPSESLEPALPPLMPELDGEEVPEVPS
ESLEPALPPLMPELDGEEVPEVPSESLEPALPPLMPELDGEEVPEVPSES
LEPALPPLMPELDGEEVPEKPSVDLPIEVPRYEFNNKDQSPLAGESGETE
YITEVYGNQQNPVDIDKKLPNETGFSGNMVETEDTKEPEVLMGGQSESVE
FTKDTQTGMSGQTTPQVETEDTKEPEVLMGGQSESVEFTKDTQTGMSGQT
TPQVETEDTKEPGVLMGGQSESVEFTKDTQTGMSGQTTPQVETEDTKEPG
VLMGGQSESVEFTKDTQTGMSGFSETVTIVEDTRPKLVFHFDNNEPKVEE
NREKPTKNITPTLPATGDIENVLAFLGILILSVLSTFSLLKNKQNNKV

[1139] 19224135 is thought to be a capsular polysaccharide adhesin (Cpa) protein. An example of a nucleotide sequence encoding the Cpa protein (SEQ ID NO:108) and a Cpa protein amino acid sequence (SEQ ID NO:109) are set forth below.

SEQ ID NO: 108

ATGAATAACAAAAAATTGCAAAAGAAGCAAGATGCTCCTCGGGTATCAAA
CAGAAAGCCAAAACAATTAACTGTCACTTTAGTGGGAGTATTTTTAATGT
TTTTGACCTTGGTAAGTTCCATGAGAGGTGCTCAAAGCATATTTGGAGAG
GAAAAGAGAATTGAAGAAGTCAGTGTTCCTAAAATAAAAAGTCCAGATGA
TGCCTACCCTTGGTATGGCTATGATTCATATGACTCTAGTCATCCTTACT
ATGAACGTTTTAAAGTAGCACATGATTTAAGGGTTAATTTAAATGGAAGT
AAGAGCTACCAAGTATATTGCTTTAATATCAATTCTCATTATCCGAATAG
AAAAAATGCTTTTTCTAAACAATGGTTTAAGAGAGTTGATGGGACAGGTG
ATGTGTTCACAAATTATGCTCAGACACCTAAGATTCGTGGAGAATCATTG
AATAATAAACTTTTAAGTATTATGTACAACGCTTATCCTAAAAATGCTAA
TGGCTATATGGATAAGATAGAACCATTAAATGCTATTTTAGTAACTCAAC
AAGCTGTTTGGTACTATTCTGACAGTTCTTATGGTAATATAAAAACGTTA
TGGGCATCTGAGCTTAAAGACGGAAAAATAGATTTTGAACAAGTAAAATT
AATGCGTGAAGCTTACTCAAACTAATTAGTGATGATTTAGAAGAAACATC
TAAAAATAAGCTACCTCAAGGATCTAAACTGAATATTTTTGTTCCGCAAG
ATAAATCTGTTCAAAATTTATTAAGTGCAGAGTACGTGCCTGAATCCCCT
CCGGCACCAGGTCAGTCTCCAGAACCGCCAGTGCAAACAAAAAAAACATC
AGTCATTATCAGAAAATATGCGGAAGGTGACTACTCTAAACTTCTAGAGG
GAGCAACTTTGCGTTTAACAGGGGAAGATATCCTAGATTTTCAAGAAAAA
GTCTTCCAAAGTAATGGAACAGGAGAAAAGATTGAATTATCAAATGGGAC
TTATACCTTAACAGAAACATCATCTCCAGATGGATATAAAATTGCGGAGC
CGATTAAGTTTAGAGTAGTGAATAAAAAAGTATTTATCGTCCAAAAAGAT
GGTTCTCAAGTGGAAAATCCAAACAAAGAAGTAGCAGAGCCATACTCAGT
GGAAGCGTACAGCGATATGCAAGATAGTAACTATATTAATCCAGAAACGT
TCACTCCTTATGGGAAATTTTATTACGCTAAAAATAAGGATAAAAGTTCA
CAAGTTGTCTACTGTTTTAATGCTGATTTACACTCTCCACCTGAATCAGA
GGATGGGGGAGGAACTATAGATCCTGATATTAGTACGATGAAAGAAGTCA
AGTACACACATACGGCAGGTAGTGATTTGTTTAAATACGCGCTAAGACCG
AGAGATACAAATCCAGAAGACTTCTTAAAGCACATTAAAAAAGTAATTGA
AAAAGGCTACAATAAAAAAGGTGATAGCTATAATGGATTAACAGAAACAC
AGTTTCGCGCGGCTACTCAGCTTGCTATCTATTACTTTACAGACAGCACT
GACTTAAAAACCTTAAAAACTTATAACAATGGGAAAGGTTACCATGGATT
TGAATCTATGGATGAAAAAACCCTAGCTGTAACAAAGAATTAATTAATTA
CGCTCAAGATAATAGTGCCCCTCAACTAACAAATCTTGATTTCTTCGTAC
CTAATAATAGCAAATACCAATCTCTTATTGGGACAGAATACCATCCAGAT
GATTTGGTTGACGTGATTCGTATGGAAGATAAAAAGCAAGAAGTTATTCC
AGTAACTCACAGTTTGACAGTGAAAAAAACAGTAGTCGGTGAGTTGGGAG
ATAAAACTAAAGGCTTCCAATTTGAACTTGAGTTGAAAGATAAAACTGGA
CAGCCTATTGTTAACACTCTAAAAACTAATAATCAAGATTTAGTAGCTAA
AGATGGGAAATATTCATTTAATCTAAAGCATGGTGACACCATAAGAATAG
AAGGATTACCGACGGGATATTCTTATACTCTGAAAGAGACTGAAGCTAAG
GATTATATAGTAACCGTTGATAACAAAGTTAGTCAAGAAGCTCAATCAGC
AAGTGAGAATGTCACAGCAGACAAAGAAGTCACTTTTGAAAACCGTAAAG
ATCTTGTCCCACCAACTGGTTTTATTACTGATGGTGGAACCTATCTGTGG
TTATTATTGCTTGTCCCATTTGGTTTGTTAGTGTGGTTCTTTGGTCGTAA
AGGACTAAAAAATGACTAA

SEQ ID NO: 109

MNNKKLQKKQDAPRVSNRKPKQLTVTLVGVFLMFLTLVSSMRGAQSIFGE
EKRIEEVSVPKIKSPDDAYPWYGYDSYDSSHPYYERFKVAHDLRVNLNGS
KSYQVYCFNINSHYPNRKNAFSKQWFKRVDGTGDVFTNYAQTPKIRGESL
NNKLLSIMYNAYPKNANGYMDKIEPLNAILVTQQAVWYYSDSSYGNIKTL
WASELKDGKIDFEQVKLMREAYSKLISDDLEETSKNKLPQGSKLNIFVPQ
DKSVQNLLSAEYVPESPPAPGQSPEPPVQTKKTSVIIRKYAEGDYSKLLE
GATLRLTGEDILDFQEKVFQSNGTGEKIELSNGTYTLTETSSPDGYKIAE
PIKFRVVNKKVFIVQKDGSQVENPNKEVAEPYSVEAYSDMQDSNYINPET
FTPYGKFYYAKNKDKSSQVVYCFNADLHSPPESEDGGGTIDPDISTMKEV
KYTHTAGSDLFKYALRPRDTNPEDFLKHIKKVIEKGYNKKGDSYNGLTET
QFRAATQLAIYYFTDSTDLKTLKTYNNGKGYHGFESMDEKTLAVTKELIN
YAQDNSAPQLTNLDFFVPNNSKYQSLIGTEYHPDDLVDVIRMEDKKQEVI
PVTHSLTVKKTVVGELGDKTKGFQFELELKDKTGQPIVNTLKTNNQDLVA
KDGKYSFNLKHGDTIRIEGLPTGYSYTLKETEAKDYIVTVDNKVSQEAQS
ASENVTADKEVTFENRKDLVPPTGFITDGGTYLWLLLLVPFGLLVWFFGR
KGLKND

[1140] 19224135 contains an amino acid motif indicative of a cell wall anchor: SEQ ID NO:184 VPPTG (shown in italics in SEQ ID NO:109, above). In some recombinant host cell systems, it may be preferable to remove this motif to facilitate secretion of a recombinant 19224135 protein from the host cell. Alternatively, in other recombinant host cell systems, it may be preferable to use the cell wall anchor motif to anchor the recombinantly expressed protein to the cell wall. The extracellular domain of the expressed protein may be cleaved during purification or the recombinant protein may be left attached to either inactivated host cells or cell membranes in the final composition.

[1141] A pilin motif, discussed above, containing a conserved lysine (K) residue has also been identified in 19224135. The pilin motif sequence is underlined in SEQ ID NO:109, below. Conserved lysine (K) residues are also marked in bold, at amino acid residues 164 and 172. The pilin sequence, in particular the conserved lysine residues, are thought to be important for the formation of oligomeric, pilus-like structures. Preferred fragments of 19224135 include at least one conserved lysine residue. Preferably, fragments include the pilin sequence.

SEQ ID NO: 109

MNNKKLQKKQDAPRVSNRKPKQLTVTLVGVFLMFLTLVSSMRGAQSIFGE
EKRIEEVSVPKIKSPDDAYPWYGYDSYDSSHPYYERFKVAHDLRVNLNGS
KSYQVYCFNINSHYPNRKNAFSKQWFKRVDGTGDVFTNYAQTPKIRGESL
NNKLLSIMYNAYPKNANGYMDKIEPLNAILVTQQAVWYYSDSSYGNIKTL
WASELKDGKIDFEQVKLMREAYSKLISDDLEETSKNKLPQGSKLNIFVPQ
DKSVQNLLSAEYVPESPPAPGQSPEPPVQTKKTSVIIRKYAEGDYSKLLE
GATLRLTGEDILDFQEKVFQSNGTGEKIELSNGTYTLTETSSPDGYKIAE
PIKFRVVNKKVFIVQKDGSQVENPNKEVAEPYSVEAYSDMQDSNYINPET
FTPYGKFYYAKNKDKSSQVVYCFNADLHSPPESEDGGGTIDPDISTMKEV
KYTHTAGSDLFKYALRPRDTNPEDFLKHIKKVIEKGYNKKGDSYNGLTET
QFRAATQLAIYYFTDSTDLKTLKTYNNGKGYHGFESMDEKTLAVTKELIN
YAQDNSAPQLTNLDFFVPNNSKYQSLIGTEYHPDDLVDVIRMEDKKQEVI
PVTHSLTVKKTVVGELGDKTKGFQFELELKDKTGQPIVNTLKTNNQDLVA
KDGKYSFNLKHGDTIRIEGLPTGYSYTLKETEAKDYIVTVDNKVSQEAQS
ASENVTADKEVTFENRKDLVPPTGFITDGGTYLWLLLLVPFGLLVWFFGR
KGLKND

[1142] An E box containing a conserved glutamic residue has been identified in 19224135. The E-box motif is underlined in SEQ ID NO:109, below. The conserved glutamic acid (E), at amino acid residue 339, is marked in bold. The E box motif, in particular the conserved glutamic acid residue, is thought to be important for the formation of oligomeric pilus-like structures of 19224135. Preferred fragments of 19224135 include the conserved glutamic acid residue. Preferably, fragments include the E box motif.

SEQ ID NO: 109

MNNKKLQKKQDAPRVSNRKPKQLTVTLVGVFLMFLTLVSSMRGAQSIFGE
EKRIEEVSVPKIKSPDDAYPWYGYDSYDSSHPYYERFKVAHDLRVNLNGS
KSYQVYCFNINSHYPNRKNAFSKQWFKRVDGTGDVFTNYAQTPKIRGESL
NNKLLSIMYNAYPKNANGYMDKIEPLNAILVTQQAVWYYSDSSYGNIKTL
WASELKDGKIDFEQVKLMREAYSKLISDDLEETSKNKLPQGSKLNIFVPQ
DKSVQNLLSAEYVPESPPAPGQSPEPPVQTKKTSVIIRKYAEGDYSKLLE
GATLRLTGEDILDFQEKVFQSNGTGEKIELSNGTYTLTETSSPDGYKIAE
PIKFRVVNKKVFIVQKDGSQVENPNKEVAEPYSVEAYSDMQDSNYINPET
FTPYGKFYYAKNKDKSSQVVYCFNADLHSPPESEDGGGTIDPDISTMKEV
KYTHTAGSDLFKYALRPRDTNPEDFLKHIKKVIEKGYNKKGDSYNGLTET
QFRAATQLAIYYFTDSTDLKTLKTYNNGKGYHGFESMDEKTLAVTKELIN
YAQDNSAPQLTNLDFFVPNNSKYQSLIGTEYHPDDLVDVIRMEDKKQEVI
PVTHSLTVKKTVVGELGDKTKGFQFELELKDKTGQPIVNTLKTNNQDLVA
KDGKYSFNLKHGDTIRIEGLPTGYSYTLKETEAKDYIVTVDNKVSQEAQS
ASENVTADKEVTFENRKDLVPPTGFITDGGTYLWLLLLVPFGLLVWFFGR
KGLKND

[1143] 19224136 is thought to be a LepA protein. An example of a nucleotide sequence encoding the LepA protein (SEQ ID NO:110) and a LepA protein amino acid sequence (SEQ ID NO:111) are set forth below.

SEQ ID NO: 110

ATGACTAATTACCTAAATCGCTTAAATGAGAATCCACTATTTAAAGCTTT
CATACGGTTAGTACTTAAGATTTCTATTATTGGATTTCTAGGTTACATTC
TATTTCAGTATGTTTTTGGCGTCATGATTGTTAACACAAATCAGATGAGT
CCTGCTGTAAGTGCTGGTGATGGAGTCTTATATTATCGTTTGACTGATCG
CTATCATATTAATGATGTGGTGGTCTATGAGGTTGATAACACTTTGAAAG
TTGGTCGAATTGCCGCTCAAGCTGGCGATGAGGTTAGTTTTACGCAAGAA
GGAGGACTGTTGATTAATGGGCATCCACCAGAAAAAGAGGTCCCTTACCT
GACGTATCCTCACTCAAGTGGTCCAAACTTTCCCTATAAAGTTCCTACGG
GTACGTATTTCATATTGAATGATTATCGTGAAGAACGTTTGGACAGTCGT
TATTATGGGGCGTTACCCATCAATCAAATCAAAGGGAAAATCTCAACTCT
ATTAAGAGTGAGAGGAATTTAA

SEQ ID NO: 111

MTNYLNRLNENPLFKAFIRLVLKTSIIGFLGYILFQYVFGVMIVNTNQMS
PAVSAGDGVLYYRLTDRYHINDVVVYEVDNTLKVGRIAAQAGDEVSFTQE
GGLLINGHPPEKEVPYLTYPHSSGPNFPYKVPTGTYFILNDYREERLDSR
YYGALPINQIKOKISTLLRVRGI

[1144] 19224137 is thought to be a fimbrial protein. An example of a nucleotide sequence encoding the fimbrial protein (SEQ ID NO:112) and a fimbrial protein amino acid sequence (SEQ ID NO:113) are set forth below.

SEQ ID NO: 112

ATGAAAAAAAATAAATTATTACTTGCTACTGCAATCTTAGCAACTGCTTT
AGGAACAGCTTCTTTAAATCAAAACGTAAAAGCTGAGACGGCAGGGGTTG
TTAGCAGTGGTCAATTAACAATAAAAAAATCAATTACAAATTTTAATGAT
GATACACTTTTGATGCCTAAGACAGACTATACTTTTAGCGTTAATCCGGA
TAGTGCGGCTACAGGTACTGAAAGTAATTTACCAATTAAACCAGGTATTG
CTGTTAACAATCAAGATATTAAGGTTTCTTATTCTAATACTGATAAGACA
TCAGGTAAAGAAAAACAAGTTGTTGTTGACTTTATGAAAGTTACTTTTCC
TAGCGTTGGTATTTACCGTTATGTTGTTACCGAGAATAAAGGGACAGCAG
AAGGAGTTACATATGATGATACAAAATGGTTAGTTGACGTCTATGTTGGT
AATAATGAAAAGGGAGGTCTTGAACCAAAGTATATTGTATCTAAAAAAGG
AGATTCTGCTACTAAAGAACCAATCCAGTTTAATAATTCATTCGAAACAA
CGTCATTAAAAATTGAAAAGGAAGTTACTGGTAATACAGGAGATCATAAA
AAAGCATTTACCTTTACATTAACATTGCAACCAAATGAATACTATGAGGC
AAGTTCGGTTGTGAAAATTGAAGAGAACGGACAAACGAAAGATGTGAAAA
TTGGGGAGGCATATAAGTTTACTTTGAACGATAGTCAGAGTGTGATATTG
TCTAAATTACCAGTTGGTATTAATTATAAAGTTGAAGAAGCAGAAGCTAA
TCAAGGTGGATATACTACAACAGCAACTTTAAAAGATGGAGAAAAGTTAT
CTACTTATAACTTAGGTCAGGAACATAAAACAGACAAGACTGCTGATGAA
ATCGTTGTCACAAATAACCGTGACACTCAAGTTCCAACTGGTGTTGTAGG
CACCCTTGCTCCATTTGCAGTTCTTAGCATTGTGGCTATTGGTGGAGTTA
TCTATATTACAAAACGTAAAAAAGCTTAA

SEQ ID NO: 113

MKKNKLLLATAILATALGTASLNQNVKAETAGVVSSGQLTIKKSITNFND
DTLLMPKTDYTFSVNPDSAATGTESNLPIKPGIAVNNQDIKVSYSNTDKT
SGKEKQVVVDFMKVTFPSVGIYRYVVTENKGTAEGVTYDDTKWLVDVYVG
NNEKGGLEPKYIVSKKGDSATKEPIQFNNSFETTSLKIEKEVTGNTGDHK
KAFTFTLTLQPNEYYEASSVVKIEENGQTKDVKIGEAYKFTLNDSQSVIL
SKLPVGINYKVEEAEANQGGYTTTATLKDGEKLSTYNLGQEHKTDKTADE
IVVTNNRDTQVPTGVVGTLAPFAVLSIVAIGGVIYITKRKKA

[1145] 19224137 contains an amino acid motif indicative of a cell wall anchor: SEQ ID NO:140 QVPTG (shown in italics in SEQ ID NO:113, above). In some recombinant host cell systems, it may be preferable to remove this motif to facilitate secretion of a recombinant 19224137 protein from the host cell. Alternatively, in other recombinant host cell systems, it may be preferable to use the cell wall anchor motif to anchor the recombinantly expressed protein to the cell wall. The extracellular domain of the expressed protein may be cleaved during purification or the recombinant protein may be left attached to either inactivated host cells or cell membranes in the final composition.

[1146] A pilin motif, discussed above, containing a conserved lysine (K) residue has also been identified in 19224137. The pilin motif sequence is underlined in SEQ ID NO:113, below. A conserved lysine (K) residue is also marked in bold, at amino acid residue 160. The pilin sequence, in particular the conserved lysine residues, are thought to be important for the formation of oligomeric, pilus-like structures. Preferred fragments of 19224137 include the conserved lysine residue. Preferably, fragments include the pilin sequence.

SEQ ID NO: 113

MKKNKLLLATAILATALGTASLNQNVKAETAGVVSSGQLTIKKSITNFND
DTLLMPKTDYTFSVNPDSAATGTESNLPIKPGIAVNNQDIKVSYSNTDKT
SGKEKQVVVDFMKVTFPSVGIYRYVVTENKGTAEGVTYDDTKWLVDVYVG
NNEKGGLEPKYIVSKKGDSATKEPIQFNNSFETTSLKIEKEVTGNTGDHK
KAFTFTLTLQPNEYYEASSVVKIEENGQTKDVKIGEAYKFTLNDSQSVIL
SKLPVGTNYKVEEAEANQGGYTTTATLKDGEKLSTYNLGQEHKTDKTADE
IVVTNNRDTQVPTGVVGTLAPFAVLSIVAIGGVIYITKRKKA

[1147] An E box containing a conserved glutamic residue has been identified in 19224137. The E-box motif is underlined in SEQ ID NO:113, below. The conserved glutamic acid (E), at amino acid residue 263, is marked in bold. The E box motif, in particular the conserved glutamic acid residue, is thought to be important for the formation of oligomeric pilus-like structures of 19224137. Preferred fragments of 19224137 include the conserved glutamic acid residue. Preferably, fragments include the E box motif.

SEQ ID NO: 113

MKKNKLLLATAILATALGTASLNQNVKAETAGVVSSGQLTIKKSITNFND
DTLLMPKTDYTFSVNPDSAATGTESNLPIKPGIAVNNQDIKVSYSNTDKT
SGKEKQVVVDFMKVTFPSVGTYRYVVTENKGTAEGVTYDDTKWLVDVYVG
NNEKGGLEPKYIVSKKGDSATKEPIQFNNSFETTSLKIEKEVTGNTGDHK
KAFTFTLTLQPNEYYEASSVVKIEENGQTKDVKIGEAYKFTLNDSQSVIL
SKLPVGINYKVEEAEANQGGYTTTATLKDGEKLSTYNLGQEHKTDKTADE
IVVTNNRDTQVPTGVVGTLAPFAVLSIVAIGGVIYITKRKKA

[1148] 19224138 is thought to be a SrtC2-type sortase. An example of a nucleotide sequence encoding the SrtC2 sortase (SEQ ID NO:114) and a SrtC2 sortase amino acid sequence (SEQ ID NO:115) are set forth below.

SEQ ID NO: 114

ATGATGATGACAATTGTACAGGTTATCAATAAAGCCATTGATACTCTCAT
TCTTATCTTTTGTTTAGTCGTACTATTTTTAGCTGGTTTTGGTTTGTGGG
ATTCTTATCATCTCTATCAACAAGCAGACGCTTCTAATTTCAAAAAATTT
AAAACAGCTCAACAACAGCCTAAATTTGAAGACTTGTTAGCTTTGAATGA
GGATGTCATTGGTTGGTTAAATATCCCGGGGACTCATATTGATTATCCTC
TAGTTCAGGGAAAAACGAATTTAGAGTATATTAATAAAGCAGTTGATGGC
AGTGTTGCCATGTCTGGTAGTTTATTTTTAGATACACGGAATCATAATGA
TTTTACGGACGATTACTCTCTGATTTATGGCCATCATATGGCAGGTAATG
CCATGTTTGGCGAAATTCCAAAATTTTTAAAAAAGGATTTTTTCAACAAA
CATAATAAAGCTATCATTGAAACAAAAGAGAGAAAAAAACTAACCGTCAC
TATTTTTGCTTGTCTCAAGACAGATGCCTTTGACCAGTTAGTTTTTAATC
CTAATGCTATTACCAATCAAGACCAACAAAGGCAGCTCGTTGATTATATC
AGTAAAAGATCAAAACAATTTAAACCTGTTAAATTGAAGCATCATACAAA
GTTCGTTGCTTTTTCAACGTGTGAAAATTTTTCTACTGACAATCGTGTTA
TCGTTGTCGGTACTATTCAAGAATAA

SEQ ID NO: 115

MMMTIVQVINKATDTLILIFCLVVLFLAGFGLWDSYHLYQQADASNFKKF
KTAQQQPKFEDLLALNEDVIGWLNIPGTHIDYPLVQGKTNLEYINKAVDG
SVAMSGSLFLDTRNHNDFTDDYSLIYGHHMAGNANFGEIPKFLKKDFFNK
HNKAIIETKERKKLTVTIFACLKTDAFDQLVFNPNAITNQDQQRQLVDYI
SKRSKQFKPVKLKHHTKFVAFSTCENFSTDNRVIVVGTIQE

[1149] 19224139 is an open reading frame that encodes a sortase substrate motif LPXAG shown in italics in SEQ ID NO:117. An example of a nucleotide sequence of the open reading frame (SEQ ID NO:116) and the amino acid sequence encoded by the open reading frame (SEQ ID NO:117) are set forth below.

SEQ ID NO: 116

ATGTTATTTTCTGTCGTAATGATATTAACCATGCTGGCCTTTAATCAGAC
TGTTTTAGCAAAAGACAGCACTGTTCAAACTAGCATTAGTGTCGAAAATG
TCTTAGAGAGAGCAGGCGATAGTACCCCATTTTCGATTGCATTAGAATCA
ATTGATGCGATGAAAACAATAGAAGAAATAACAATTGCTGGTTCTGGAAA
AGCAAGCTTTTCCCCTCTGACCTTCACAACAGTTGGGCAATATACTTATC
GTGTTTATCAGAAGCCTTCACAAAATAAAGATTATCAAGCAGATACTACT
GTATTTGACGTTCTTGTCTATGTGACCTATGATGAAGATGGGACTCTAGT
CGCAAAAGTTATTTCTCGAAGGGCTGGAGACGAAGAAAAATCAGCGATTA
CTTTTAAGCCCAAACGGTTAGTAAAACCAATACCGCCTAGACAACCTAAC
ATCCCTAAAACCCCATTACCATTAGCTGGTGAAGTAAAAAGTTTATTGGG
TATCTTAAGTATCGTATTACTGGGGTTACTAGTTCTTCTTTATGTTAAAA
AACTGAAGAG

SEQ ID NO: 117

MLFSVVMTLIMLAFNQTVLAKDSTVQTSISVENVLERAGDSTPFSIALES
IDAMKTIEEITIAGSGKASFSPLTFTTVGQYTYRVYQKPSQNKDYQADTT
VFDVLVYVTYDEDGTLVAKVISRPAGDEEKSAITFKPKRLVKPIPPRQPN
IPKTPLPLAGEVKSLLGILSIVLLGLLVLLYVKKLKSKL

[1150] 19224139 contains an amino acid motif indicative of a cell wall anchor: SEQ ID NO:185 LPLAG (shown in italics in SEQ ID NO:117, above). In some recombinant host cell systems, it may be preferable to remove this motif to facilitate secretion of a recombinant 19224139 protein from the host cell. Alternatively, in other recombinant host cell systems, it may be preferable to use the cell wall anchor motif to anchor the recombinantly expressed protein to the cell wall. The extracellular domain of the expressed protein may be cleaved during purification or the recombinant protein may be left attached to either inactivated host cells or cell membranes in the final composition.

[1151] A pilin motif, discussed above, containing a conserved lysine (K) residue has also been identified in 19224139. The pilin motif sequence is underlined in SEQ ID NO:117, below. A conserved lysine (K) residue is also marked in bold, at amino acid residue 138. The pilin sequence, in particular the conserved lysine residue, is thought to be important for the formation of oligomeric, pilus-like structures. Preferred fragments of 19224139 include the conserved lysine residue. Preferably, fragments include the pilin sequence.

SEQ ID NO: 117

MLFSVVMILTMLAFNQTVLAKDSTVQTSISVENVLERAGDSTPFSIALES
IDAMKTIEEITIAGSGKASFSPLTFTTVGQYTYRVYQKPSQNKDYQADTT
VFDVLVYVTYDEDGTLVAKVISRRAGDEEKSAITFKPKRLVKPIPPRQPN
IPKTPLPLAGEVKSLLGILSIVLLGLLVLLYVKKLKSKL

[1152] Two E boxes containing conserved glutamic residues have been identified in 19224139. The E-box motifs are underlined in SEQ ID NO:117, below. The conserved glutamic acid (E) residues, at amino acid residues 58 and 128, are marked in bold. The E box motifs, in particular the conserved glutamic acid residues, are thought to be important for the formation of oligomeric pilus-like structures of 19224139. Preferred fragments of 19224139 include at least one conserved glutamic acid residue. Preferably, fragments include at least one E box motif.

SEQ ID NO: 117

MLFSVVMILTMLAFNQTVLAKDSTVQTSISVENVLERAGDSTPFSIA
LESIDAMKTIEEITIAGSGKASFSPLTFTTVGQYTYRVYQKPSQNKD
YQADTTVFDVLVYVTYDEDGTLVAKVISRRAGDEEKSAITFKPKRLV
KPIPPRQPNIPKTPLPLAGEVKSLLGILSIVLLGLLVLLYVKKLKSK
L

[1153] 19224140 is thought to be a MsmRL protein. An example of a nucleotide sequence encoding the MsmRL protein (SEQ ID NO:118) and a MsmRL protein amino acid sequence (SEQ ID NO:119) are set forth below.

SEQ ID NO: 118

ATGGTTATATTCGATTTAAAACATGTGCAAACATTACACAGCTTGTCTCA
ATTACCTATTTCAGTGATGTCACAAGATAAGGCACTTATTCAAGTATATG
GTAATGACGACTATTTATTATGTTACTATCAATTTTTAAAGCATCTAGCT
ATTCCTCAAGCTGCACAAGATGTTATTTTTTATGAGGGTTTATTTGAAGA
GTCCTTTATGATTTTTCCTCTTTGTCACTACATTATTGCCATTGGACCTT
TCTACCCTTATTCACTTAATAAAGACTATCAGGAACAATTAGCTAATAAT
TTTTTAAAACATTCTTCTCATCGTAGCAAAGAAGAGCTCTTATCCTATAT
GGCACTTGTCCCACATTTTCCAATTAATAATGTGCGGAACCTTTTGATAG
CTATTGACGCTTTTTTTGACACACAATTTGAGACGACTTGCCAACAAACA
ATTCATCAATTGTTGCAGCATTCAAAACAGATGACTGCTGATCCTGATAT
CATTCATCGCCTTAAGCATATTAGCAAAGCATCTAGCCAACTACCGCCTG
TTTTAGAGCACCTAAATCATATTATGGATCTGGTAAAGCTAGGCAATCCA
CAATTGCTCAAGCAAGAAATCAATCGCATCCCCTTATCAAGTATCACCTC
ATCTTCTATTTCTGCTCTAAGGGCGGAAAAGAACCTCACTGTTATCTATT
TAACTAGGTTACTGGAATTCAGTTTTGTAGAAAATACTGACGTAGCAAAG
CATTATAGCCTTGTCAAATACTACATGGCCTTAAATGAAGAAGCGAGTGA
CTTGCTCAAAGTTTTGAGAATTCGCTGTGCAGCCATCATCCATTTTTCCG
AATCATTAACCAATAAAAGTATTTCTGATAAACGTCAAATGTACAATAGT
GTGCTTCATTATGTCGATAGTCACCTGTATTCCAAATTAAAGGTATCTGA
TATCGCTAAGCGCCTATATGTTTCCGAATCTCACTTACGTTCAGTCTTTA
AAAAATACTCAAATGTTTCCTTACAACATTATATTCTAAGTACAAAAATC
AAAGAAGCTCAACTACTCTTAAAACGAGGAATTCCTGTTGGAGAAGTGGC
TAAAAGCTTATATTTTTATGACACTACCCATTTTCATAAAATCTTTAAAA
AATACACGGGTATTTCTTCAAAAGACTATCTTGCTAAATACCGAGATAAT
ATTTAA

SEQ ID NO: 119

MVIFDLKHVQTLHSLSQLPISVMSQDKALIQVYGNDDYLLCYYQFLKHLA
IPQAAQDVIFYEGLFEESFMIFPLCHYIIAIGPFYPYSLNKDYQEQLANN
FLKHSSHRSKEELLSYMALVPHFPINNVRNLLIAIDAFFDTQFETTCQQT
IHQLLQHSKQMTADPDIIHRLKHISKASSQLPPVLEHLNHIMDLVKLGNP
QLLKQEINRIPLSSITSSSISALPAEKNLTVIYLTRLLEFSFVENTDVAK
HYSLVKYYMALNEEASDLLKVLRIRCAAIIHFSESLTNKSISDKRQMYNS
VLHYVDSHLYSKLKVSDIAKRLYVSESHLRSVFKKYSNVSLQHYILSTKI
KEAQLLLKRGIPVGEVAKSLYFYDTTHFHKIFKKYTGISSKDYLAKYRDN
I

[1154] 19224141 is thought to be a protein F2 fibronectin binding protein. An example of a nucleotide sequence encoding the protein F2 fibronectin binding protein (SEQ ID NO:120) and a protein F2 fibronectin binding protein amino acid sequence (SEQ ID NO:121) are set forth below.

SEQ ID NO: 120

ATGACACAAAAAAATAGCTATAAGTTAAGCTTCCTGTTATCCCTAACAGG
ATTTATTTTAGGTTTATTATTGGTTTTTATAGGATTGTCCGGAGTATCAG
TAGGACATGCGGAAACAAGAAATGGAGCAAACAAACAAGGATCTTTTGAA
ATCAAGAAAGTCGACCAAAACAATAAGCCTTTACCGGGAGCAACTTTTTC
ACTGACATCAAAGGATGGCAAGGGAACATCTGTTCAAACGTTCACTTCAA
ATGATAAAGGTATTGTAGATGCTCAAAATCTCCAACCAGGGACTTATACC
TTAAAAGAAGAAACAGCACCAGATGGTTATGATAAAACCAGCCGGACTTG
GACAGTGACTGTTTATGAGAACGGCTATACCAAGTTGGTTGAAAATCCCT
ATAATGGGGAAATCATCAGTAAAGCAGGGTCAAAAGATGTTAGTAGTTCT
TTACAGTTGGAAAATCCCAAAATGTCAGTTGTTTCTAAATATGGGAAAAC
AGAGGTTAGTAGTGGCGCAGCGGATTTCTACCGCAACCATGCCGCCTATT
TTAAAATGTCTTTTGAGTTGAAACAAAAGGATAAATCTGAAACAATCAAC
CCAGGTGATACCTTTGTGTTACAGCTGGATAGACGTCTCAATCCTAAAGG
TATCAGTCAAGATATCCCTAAAATCATTTACGACAGTGCAAATAGTCCGC
TTGCGATTGGAAAATACCATGCTGAGAACCATCAACTTATCTATACTTTC
ACAGATTATATTGCGGGTTTAGATAAAGTCCAGTTGTCTGCAGAATTGAG
CTTATTCCTAGAGAATAAGGAAGTGTTGGAAAATACTAGTATCTCAAATT
TTAAGAGTACCATAGGTGGGCAGGAGATCACCTATAAAGGAACGGTTAAT
GTTCTTTATGGAAATGAGAGCACTAAAGAAAGCAATTATATTACTAATGG
ATTGAGCAATGTGGGTGGGAGTATTGAAAGCTACAACACCGAAACGGGAG
AATTTGTCTGGTATGTTTATGTCAATCCAAACCGTACCAATATTCCTTAT
GCGACCATGAATTTATGGGGATTTGGAAGGGCTCGTTCAAATACAAGCGA
CTTAGAAAACGACGCTAATACAAGTAGTGCTGAGCTTGGAGAGATTCAGG
TCTATGAAGTACCTGAAGGAGAAAAATTACCATCAAGTTATGGGGTTGAT
GTTACAAAACTTACTTTAAGAACGGATATCACAGCAGGCCTAGGAAATGG
TTTTCAAATGACCAAACGTCAGCGAATTGACTTTGGAAATAATATCCAAA
ATAAAGCATTTATCATCAAAGTAACAGGGAAAACAGACCAATCTGGTAAG
CCATTGGTTGTTCAATCCAATTTGGCAAGTTTTCGTGGTGCTTCTGAATA
TGCTGCTTTTACTCCAGTTGGAGGAAATGTCTACTTCCAAAACGAAATTG
CCTTGTCTCCTTCTAAGGGTAGTGGTTCTGGGAAAAGTGAATTTACTAAG
CCCTCTATTACAGTAGCAAATCTAAAACGAGTGGCTCAGCTTCGCTTTAA
GAAAATGTCAACTGACAATGTGCCATTGCCAGAAGCGGCTTTTGAGCTGC
GTTCATCAAATGGTAATAGTCAGAAATTAGAAGCCAGTTCAAACACACAA
GGAGAGGTTCACTTTAAGGACCTGACCTCGGGCACATATGACCTGTATGA
AACAAAAGCGCCAAAAGGTTATCAGCAGGTGACAGAGAAATTGGCGACCG
TTACTGTTGATACTACCAAACCTGCTGAGGAAATGGTCACTTGGGGAAGC
CCACATTCGTCTGTAAAAGTAGAAGCTAACAAAGAAGTCACGATTGTCAA
CCATAAAGAAACCCTTACGTTTTCAGGGAAGAAAATTTGGGAGAATGACA
GACCAGATCAACGCCCAGCAAAGATTCAAGTGCAACTGTTGCAAAATGGT
CAAAAGATGCCTAACCAGATTCAAGAAGTAACGAAGGATAACGATTGGTC
TTATCACTTCAAAGACTTGCCTAAGTACGATGCCAAGAATCAGGAGTATA
AGTACTCAGTTGAAGAAGTAAATGTTCCAGACGGCTACAAGGTGTCGTAT
TTAGGAAATGATATATTTAACACCAGAGAAACAGAATTTGTGTTTGAACA
GAATAACTTTAACCTTGAATTTGGAAATGCTGAAATAAAAGGTCAATCTG
GGTCAAAAATCATTGATGAAGACACGCTAACGTCTTTCAAAGGTAAGAAA
ATTTGGAAAAATGATACGGCAGAAAATCGTCCCCAAGCCATTCAAGTGCA
GCTTTATGCTGATGGAGTGGCTGTGGAAGGTCAAACCAAATTTATTTCTG
GCTCAGGTAATGAGTGGTCATTTGAGTTTAAAAACTTGAAGAAGTATAAT
GGAACAGGTAATGACATCATTTACTCAGTTAAAGAAGTAACTGTTCCAAC
AGGTTATGATGTGACTTACTCAGCTAATGATATTATTAATACCAAACGTG
AGGTTATTACACAACAAGGACCGAAACTAGAGATTGAAGAAACGCTTCCG
CTAGAATCAGGTGCTTCAGGCGGTACCACTACTGTCGAAGACTCACGCCC
AGTTGATACCTTATCAGGTTTATCAAGTGAGCAAGGTCAGTCCGGTGATA
TGACAATTGAAGAAGATAGTGCTACCCATATTAAATTCTCAAAACGTGAT
ATTGACGGCAAAGAGTTAGCTGGTGCAACTATGGAGTTGCGTGATTCATC
TGGTAAAACTATTAGTACATGGATTTCAGATGGACAAGTGAAAGATTTCT
ACCTGATGCCAGGAAAATATACATTTGTCGAAACCGCAGCACCAGACGGT
TATGAGATAGCAACTGCTATTACCTTTACAGTTAATGAGCAAGGTCAGGT
TACTGTAAATGGCAAAGCAACTAAAGGTGACACTCATATTGTCATGGTTG
ATGCTTACAAGCCAACTAAGGGTTCAGGTCAGGTTATTGATATTGAAGAA
AAGCTTCCAGACGAGCAAGGTCATTCTGGTTCAACTACTGAAATAGAAGA
CAGTAAATCTTCAGACCTTATCATTGGCGGTCAAGGTGAAGTTGTTGACA
CAACAGAAGACACACAAAGTGGTATGACGGGCCATTCTGGCTCAACTACT
GAAATAGAAGATAGCAAGTCTTCAGACGTTATCATTGGTGGTCAGGGGCA
GGTTGTCGAGACAACAGAGGATACCCAAACTGGCATGTACGGGGATTCTG
GTTGTAAAACGGAAGTCGAAGATACTAAACTAGTACAATCCTTCCACTTT
GATAACAAGGAACCAGAAAGTAACTCTGAGATTCCTAAAAAAGATAAGCC
AAAGAGTAATACTAGTTTACCAGCAACTGGTGAGAAGCAACATAATATGT
TCTTTTGGATGGTTACTTCTTGCTCACTTATTAGTAGTGTTTTTGTAATA
TCACTAAAATCCAAAAAACGCCTATCATCATGTTAA

SEQ ID NO: 121

MTQKNSYKLSFLLSLTGFILGLLLVFIGLSGVSVGHAETRNGANKQGSFE
IKKVDQNNKPLPGATFSLTSKDGKGTSVQTFTSNDKGIVDAQNLQPGTYT
LKEETAPDGYDKTSRTWTVTVYENGYTKLVENPYNGEIISKAGSKDVSSS
LQLENPKMSVVSKYGKTEVSSGAADFYRNHAAYFKMSFELKQKDKSETIN
PGDTFVLQLDRRLNPKGISQDIPKIIYDSANSPLAIGKYHAENHQLIYTF
TDYIAGLDKVQLSAELSLFLENKEVLENTSISNFKSTIGGQEITYKGTVN
VLYGNESTKESNYITNGLSNVGGSIESYNTETGEFVWYVYVNPNRTNIPY
ATMNLWGFGRARSNTSDLENDANTSSAELGEIQVYEVPEGEKLPSSYGVD
VTKLTLRTDITAGLGNGFQMTKRQRIDFGNNIQNKAFIIKVTGKTDQSGK
PLVVQSNLASFRGASEYAAFTPVGGNVYFQNEIALSPSKGSGSGKSEFTK
PSITVANLKRVAQLRFKKMSTDNVPLPEAAFELRSSNGNSQKLEASSNTQ
GEVHFKDLTSGTYDLYETKAPKGYQQVTEKLATVTVDTTKPAEEMVTWGS
PHSSVKVEANKEVTIVNHKETLTFSGKKIWENDRPDQRPAKIQVQLLQNG
QKMPNQIQEVTKDNDWSYHFKDLPKYDAKNQEYKYSVEEVNVPDGYKVSY
LGNDIFNTRETEFVFEQNNFNLEFGNAEIKGQSGSKIIDEDTLTSFKGKK
IWKNDTAENRPQAIQVQLYADGVAVEGQTKFISGSGNEWSFEFKNLKKYN
GTGNDIIYSVKEVTVPTGYDVTYSANDIINTKREVITQQGPKLEIEETLP
LESGASGGTTTVEDSRPVDTLSGLSSEQGQSGDMTIEEDSATHIKFSKRD
IDGKELAGATMELRDSSGKTISTWISDGQVKDFYLMPGKYTFVETAAPDG
YEIATAITFTVNEQGQVTVNGKATKGDTHIVMVDAYKPTKGSGQVIDIEE
KLPDEQGHSGSTTEIEDSKSSDLIIGGQGEVVDTTEDTQSGMTGHSGSTT
EIEDSKSSDVIIGGQGQVVETTEDTQTGMYGDSGCKTEVEDTKLVQSFHF
DNKEPESNSEIPKKDKPKSNTSLPATGEKQHNMFFWMVTSCSLISSVFVI
SLKSKKRLSSC

[1155] 19224141 contains an amino acid motif indicative of a cell wall anchor: SEQ ID NO:181 LPATG (shown in italics in SEQ ID NO:121, above). In some recombinant host cell systems, it may be preferable to remove this motif to facilitate secretion of a recombinant 19224141 protein from the host cell. Alternatively, in other recombinant host cell systems, it may be preferable to use the cell wall anchor motif to anchor the recombinantly expressed protein to the cell wall. The extracellular domain of the expressed protein may be cleaved during purification or the recombinant protein may be left attached to either inactivated host cells or cell membranes in the final composition.

[1156] Two pilin motifs, discussed above, containing conserved lysine (K) residues have also been identified in 19224141. The pilin motif sequences are underlined in SEQ ID NO:121, below. Conserved lysine (K) residues are also marked in bold, at amino acid residues 157 and 163 and at amino acid residues 216, 224, and 238. The pilin sequence, in particular the conserved lysine residues, are thought to be important for the formation of oligomeric, pilus-like structures. Preferred fragments of 19224141 include at least one conserved lysine residue. Preferably, fragments include at least one pilin sequence.

SEQ ID NO: 121

MTQKNSYKLSFLLSLTGFILGLLLVFIGLSGVSVGHAETRNGANKQGSFE
IKKVDQNNKPLPGATFSLTSKDGKGTSVQTFTSNDKGIVDAQNLQPGTYT
LKEETAPDGYDKTSRTWTVTVYENGYTKLVENPYNGEIISKAGSKDVSSS
LQLENPKMSVVSKYGKTEVSSGAADFYRNHAAYFKMSFELKQKDKSETIN
PGDTFVLQLDRRLNPKGISQDIPKIIYDSANSPLAIGKYHAENHQLIYTF
TDYIAGLDKVQLSAELSLFLENKEVLENTSISNFKSTIGGQEITYKGTVN
VLYGNESTKESNYITNGLSNVGGSIESYNTETGEFVWYVYVNPNRTNIPY
ATMNLWGFGRARSNTSDLENDANTSSAELGEIQVYEVPEGEKLPSSYGVD
VTKLTLRTDITAGLGNGFQMTKRQRIDFGNNIQNKAFIIKVTGKTDQSGK
PLVVQSNLASFRGASEYAAFTPVGGNVYFQNEIALSPSKGSGSGKSEFTK
PSITVANLKRVAQLRFKKMSTDNVPLPEAAFELRSSNGNSQKLEASSNTQ
GEVHFKDLTSGTYDLYETKAPKGYQQVTEKLATVTVDTTKPAEEMVTWGS
PHSSVKVEANKEVTIVNHKETLTFSGKKIWENDRPDQRPAKIQVQLLQNG
QKMPNQIQEVTKDNDWSYHFKDLPKYDAKNQEYKYSVEEVNVPDGYKVSY
LGNDIFNTRETEFVFEQNNFNLEFGNAEIKGQSGSKIIDEDTLTSFKGKK
IWKNDTAENRPQAIQVQLYADGVAVEGQTKFISGSGNEWSFEFKNLKKYN
GTGNDIIYSVKEVTVPTGYDVTYSANDIINTKREVITQQGPKLEIEETLP
LESGASGGTTTVEDSRPVDTLSGLSSEQGQSGDMTIEEDSATHIKFSKRD
IDGKELAGATMELRDSSGKTISTWISDGQVKDFYLMPGKYTFVETAAPDG
YEIATAITFTVNEQGQVTVNGKATKGDTHIVMVDAYKPTKGSGQVIDIEE
KLPDEQGHSGSTTEIEDSKSSDLIIGGQGEVVDTTEDTQSGMTGHSGSTT
EIEDSKSSDVIIGGQGQVVETTEDTQTGMYGDSGCKTEVEDTKLVQSFHF
DNKEPESNSEIPKKDKPKSNTSLPATGEKQHNMFFWMVTSCSLISSVFVI
SLKSKKRLSSC

[1157] Two E boxes containing conserved glutamic residues have been identified in 19224141. The E-box motifs are underlined in SEQ ID NO:121, below. The conserved glutamic acid (E) residues, at amino acid residues 567 and 944, are marked in bold. The E box motifs, in particular the conserved glutamic acid residues, are thought to be important for the formation of oligomeric pilus-like structures of 19224141. Preferred fragments of 19224141 include at least one conserved glutamic acid residue. Preferably, fragments include at least one E box motif.

SEQ ID NO: 121

MTQKNSYKLSFLLSLTGFILGLLLVFIGLSGVSVGHAETRNGANKQGSFE
IKKVDQNNKPLPGATFSLTSKDGKGTSVQTFTSNDKGIVDAQNLQPGTYT
LKEETAPDGYDKTSRTWTVTVYENGYTKLVENPYNGEIISKAGSKDVSSS
LQLENPKMSVVSKYGKTEVSSGAADFYRNHAAYFKMSFELKQKDKSETIN
PGDTFVLQLDRRLNPKGISQDIPKIIYDSANSPLAIGKYHAENHQLIYTF
TDYIAGLDKVQLSAELSLFLENKEVLENTSISNFKSTIGGQEITYKGTVN
VLYGNESTKESNYITNGLSNVGGSIESYNTETGEFVWYVYVNPNRTNIPY
ATMNLWGFGRARSNTSDLENDANTSSAELGEIQVYEVPEGEKLPSSYGVD
VTKLTLRTDITAGLGNGFQMTKRQRIDFGNNIQNKAFIIKVTGKTDQSGK
PLVVQSNLASFRGASEYAAFTPVGGNVYFQNEIALSPSKGSGSGKSEFTK
PSITVANLKRVAQLRFKKMSTDNVPLPEAAFELRSSNGNSQKLEASSNTQ
GEVHFKDLTSGTYDLYETKAPKGYQQVTEKLATVTVDTTKPAEEMVTWGS
PHSSVKVEANKEVTIVNHKETLTFSGKKIWENDRPDQRPAKIQVQLLQNG
QKMPNQIQEVTKDNDWSYHFKDLPKYDAKNQEYKYSVEEVNVPDGYKVSY
LGNDIFNTRETEFVFEQNNFNLEFGNAEIKGQSGSKIIDEDTLTSFKGKK
IWKNDTAENRPQAIQVQLYADGVAVEGQTKFISGSGNEWSFEFKNLKKYN
GTGNDIIYSVKEVTVPTGYDVTYSANDIINTKREVITQQGPKLEIEETLP
LESGASGGTTTVEDSRPVDTLSGLSSEQGQSGDMTIEEDSATHIKFSKRD
IDGKELAGATMELRDSSGKTISTWISDGQVKDFYLMPGKYTFVETAAPDG
YEIATAITFTVNEQGQVTVNGKATKGDTHIVMVDAYKPTKGSGQVIDIEE
KLPDEQGHSGSTTEIEDSKSSDLIIGGQGEVVDTTEDTQSGMTGHSGSTT
EIEDSKSSDVIIGGQGQVVETTEDTQTGMYGDSGCKTEVEDTKLVQSFHF
DNKEPESNSEIPKKDKPKSNTSLPATGEKQHNMFFWMVTSCSLISSVFVI
SLKSKKRLSSC

[1158] As discussed above, applicants have also determined the nucleotide and encoded amino acid sequence of fimbrial structural subunits in several other GAS AI-4 strains of bacteria. Examples of sequences of these fimbrial structural subunits are set forth below.

[1159] M12 strain isolate 20010296 is a GAS AI-4 strain of bacteria. 20010296_fimbrial is thought to be a fimbrial structural subunit of M12 strain isolate 20010296. An example of a nucleotide sequence encoding the 20010296_fimbrial protein (SEQ ID NO:257) and a 20010296_fimbrial protein amino acid sequence (SEQ ID NO:258) are set forth below.

SEQ ID NO: 257

AGCAGTGGTCAATTAACAATAAAAAAATCAATTACAAATTTTAATGATGA
TACACTTTTGATGCCTAAGACAGACTATACTTTTAGCGTTAATCCGGATA
GTGCGGCTACAGGTACTGAAAGTAATTTACCAATTAAACCAGGTATTGCT
GTTAACAATCAAGATATTAAGGTTTCTTATTCTAATACTGATAAGACATC
AGGTAAAGAAAAACAAGTTGTTGTTGACTTTATGAAAGTTACTTTTCCTA
GCGTTGGTATTTACCGTTATGTTGTTACCGAGAATAAAGGGACAGCAGAA
GGAGTTACATATGATGATACAAAATGGTTAGTTGACGTCTATGTTGGTAA
TAATGAAAAGGGAGGTCTTGAACCAAAGTATATTGTATCTAAAAAAGGAG
ATTCTGCTACTAAAGAACCAATCCAGTTTAATAATTCATTCGAAACAACG
TCATTAAAAATTGAAAAGGAAGTTACTGGTAATACAGGAGATCATAAAAA
AGCATTTAACTTTACATTAACATTGCAACCAAATGAATACTATGAGGCAA
GTTCGGTTGTGAAAATTGAAGAGAACGGACAAACGAAAGATGTGAAAATT
GGGGAGGCATATAAGTTTACTTTGAACGATAGTCAGAGTGTGATATTGTC
TAAATTACCAGTTGGTATTAATTATAAAGTTGAAGAAGCAGAAGCTAATC
AAGGTGGATATACTACAACAGCAACTTTAAAAGATGGAGAAAAGTTATCT
ACTTATAACTTAGGTCAGGAACATAAAACAGACAAGACTGCTGATGAAAT
CGT

SEQ ID NO: 258

SSGQLTIKKSITNFNDDTLLMPKTDYTFSVNPDSAATGTESNLPIKPGIA
VNNQDIKVSYSNTDKTSGKEKQVVVDFMKVTFPSVGIYRYVVTENKGTAE
GVTYDDTKWLVDVYVGNNEKGGLEPKYIVSKKGDSATKEPIQFNNSFETT
SLKIEKEVTGNTGDHKKAFNFTLTLQPNEYYEASSVVKIEENGQTKDVKI
GEAYKFTLNDSQSVILSKLPVGINYKVEEAEANQGGYTTTATLKDGEKLS
TYNLGQEHKTDKTADEIV

[1160] M12 strain isolate 20020069 is a GAS AI-4 strain of bacteria. 20020069_fimbrial is thought to be a fimbrial structural subunit of M12 strain isolate 20020069. An example of a nucleotide sequence encoding the 20020069_{—} fimbrial protein (SEQ ID NO:259) and a 20020069_fimbrial protein amino acid sequence (SEQ ID NO:260) are set forth below.

SEQ ID NO: 259

AGCAGTGGTCAATTAACAATAAAAAAATCAATTACAAATTTTAATGATGA
TACACTTTTGATGCCTAAGACAGACTATACTTTTAGCGTTAATCCGGATA
GTGCGGCTACAGGTACTGAAAGTAATTTACCAATTAAACCAGGTATTGCT
GTTAACAATCAAGATATTAAGGTTTCTTATTCTAATACTGATAAGACATC
AGGTAAAGAAAAACAAGTTGTTGTTGACTTTATGAAAGTTACTTTTCCTA
GCGTTGGTATTTACCGTTATGTTGTTACCGAGAATAAAGGGACAGCAGAA
GGAGTTACATATGATGATACAAAATGGTTAGTTGACGTCTATGTTGGTAA
TAATGAAAAGGGAGGTCTTGAACCAAAGTATATTGTATCTAAAAAAGGAG
ATTCTGCTACTAAAGAACCAATCCAGTTTAATAATTCATTCGAAACAACG
TCATTAAAAATTGAAAAGGAAGTTACTGGTAATACAGGAGATCATAAAAA
AGCATTTAACTTTACATTAACATTGCAACCAAATGAATACTATGAGGCAA
GTTCGGTTGTGAAAATTGAAGAGAACGGACAAACGAAAGATGTGAAAATT
GGGGAGGCATATAAGTTTACTTTGAACGATAGTCAGAGTGTGATATTGTC
TAAATTACCAGTTGGTATTAATTATAAAGTTGAAGAAGCAGAAGCTAATC
AAGGTGGATATACTACAACAGCAACTTTAAAAGATGGAGAAAAGTTATCT
ACTTATAACTTAGGTCAGGAACATAAAACAGACAAGACTGCTGATGAAAT
CGT

SEQ ID NO: 260

SSGQLTIKKSITNFNDDTLLMPKTDYTFSVNPDSAATGTESNLPIKPGIA
VNNQDIKVSYSNTDKTSGKEKQVVVDFMKVTFPSVGIYRYVVTENKGTAE
GVTYDDTKWLVDVYVGNNEKGGLEPKYIVSKKGDSATKEPIQFNNSFETT
SLKIEKEVTGNTGDHKKAFNFTLTLQPNEYYEASSVVKIEENGQTKDVKI
GEAYKFTLNDSQSVILSKLPVGINYKVEEAEANQGGYTTTATLKDGEKLS
TYNLGQEHKTDKTADEIV

[1161] M12 strain isolate CDC SS 635 is a GAS AI-4 strain of bacteria. CDC SS 635_fimbrial is thought to be a fimbrial structural subunit of M12 strain isolate CDC SS 635. An example of a nucleotide sequence encoding the CDC SS 635_fimbrial protein (SEQ ID NO:261) and a CDC SS 635_fimbrial protein amino acid sequence (SEQ ID NO:262) are set forth below.

SEQ ID NO: 261

GAGACGGCAGGGGTTGTTAGCAGTGGTCAATTAACAATAAAAAAATCAAT
TACAAATTTTAATGATGATACACTTTTGATGCCTAAGACAGACTATACTT
TTAGCGTTAATCCGGATAGTGCGGCTACAGGTACTGAAAGTAATTTACCA
ATTAAACCAGGTATTGCTGTTAACAATCAAGATATTAAGGTTTCTTATTC
TAATACTGATAAGACATCAGGTAAAGAAAAACAAGTTGTTGTTGACTTTA
TGAAAGTTACTTTTCCTAGCGTTGGTATTTACCGTTATGTTGTTACCGAG
AATAAAGGGACAGCAGAAGGAGTTACATATGATGATACAAAATGGTTAGT
TGACGTCTATGTTGGTAATAATGAAAAGGGAGGTCTTGAACCAAAGTATA
TTGTATCTAAAAAAGGAGATTCTGCTACTAAAGAACCAATCCAGTTTAAT
AATTCATTCGAAACAACGTCATTAAAAATTGAAAAGGAAGTTACTGGTAA
TACAGGAGATCATAAAAAAGCATTTAACTTTACATTAACATTGCAACCAA
ATGAATACTATGAGGCAAGTTCGGTTGTGAAAATTGAAGAGAACGGACAA
ACGAAAGATGTGAAAATTGGGGAGGCATATAAGTTTACTTTGAACGATAG
TCAGAGTGTGATATTGTCTAAATTACCAGTTGGTATTAATTATAAAGTTG
AAGAAGCAGAAGCTAATCAAGGTGGATATACTACAACAGCAACTTTAAAA
GATGGAGAAAAGTTATCTACTTATAACTTAGGTCAGGAACATAAAACAGA
CAAGACTGCTGATGAAATCGTTGTCACAAATAACCGTGACACT

SEQ ID NO: 262

ETAGVVSSGQLTIKKSITNFNDDTLLMPKTDYTFSVNPDSAATGTESNLP
IKPGIAVNNQDIKVSYSNTDKTSGKEKQVVVDFMKVTFPSVGIYRYVVTE
NKGTAEGVTYDDTKWLVDVYVGNNEKGGLEPKYIVSKKGDSATKEPIQFN
NSFETTSLKIEKEVTGNTGDHKKAFNFTLTLQPNEYYEASSVVKIEENGQ
TKDVKIGEAYKFTLNDSQSVILSKLPVGINYKVEEAEANQGGYTTTATLK
DGEKLSTYNLGQEHKTDKTADEIVVTNNRDT

[1162] M5 strain isolate ISS 4883 is a GAS AI-4 strain of bacteria. ISS4883_fimbrial is thought to be a fimbrial structural subunit of M5 strain isolate ISS 4883. An example of a nucleotide sequence encoding the ISS4883_fimbrial protein (SEQ ID NO:265) and an ISS4883_fimbrial protein amino acid sequence (SEQ ID NO:266) are set forth below.

SEQ ID NO: 265

GAGACGGCAGGGGTTGTAACAGGAAAATCACTACAAGTTACAAAGACAAT
GACTTATGATGATGAAGAGGTGTTAATGCCCGAAACCGCCTTTACTTTTA
CTATAGAGCCTGATATGACTGCAAGTGGAAAAGAAGGCGACCTAGATATT
AAAAATGGAATTGTAGAAGGCTTAGACAAACAAGTAACAGTAAAATATAA
GAATACAGATAAAACATCTCAAAAAACTAAAATAGCACAATTTGATTTTT
CTAAGGTTAAATTTCCAGCTATAGGTGTTTACCGCTATATGGTTTCAGAG
AAAAACGATAAAAAAGACGGAATTAGGTACGATGATAAAAAGTGGACTGT
AGATGTTTATGTTGGGAATAAGGCCAATAACGAAGAAGGTTTCGAAGTTC
TATATATTGTATCAAAAGAAGGTACTTCTAGTACTAAAAAACCAATTGAA
TTTACAAACTCTATTAAAACTACTTCCTTAAAAATTGAAAAACAAATAAC
TGGCAATGCAGGAGATCGTAAAAAATCATTCAACTTCACATTAACATTAC
AACCAAGTGAATATTATAAAACCGGATCAGTTGTGAAAATCGAACAGGAT
GGAAGTAAAAAAGATGTGACGATAGGAACGCCTTACAAATTTACTTTGGG
ACACGGTAAGAGTGTCATGTTATCGAAATTACCAATTGGTATCAATTACT
ATCTTAGTGAAGACGAAGCGAATAAAGACGGTTACACTACAACGGCAACA
TTAAAAGAACAAGGCAAAGAAAAGAGTTCCGATTTCACTTTGAGTACTCA
AAACCAGAAAACAGACGAATCTGCTGACGAAATCGTTGTCACAAATAAGC
GTGACACTCTCGAG

SEQ ID NO: 266

ETAGVVTGKSLQVTKTMTYDDEEVLMPETAFTFTIEPDMTASGKEGDLDI
KNGIVEGLDKQVTVKYKNTDKTSQKTKIAQFDFSKVKFPAIGVYRYMVSE
KNDKKDGIRYDDKKWTVDVYVGNKANNEEGFEVLYIVSKEGTSSTKKPIE
FTNSIKTTSLKIEKQITGNAGDRKKSFNFTLTLQPSEYYKTGSVVKIEQD
GSKKDVTIGTPYKFTLGHGKSVMLSKLPIGINYYLSEDEANKDGYTTTAT
LKEQGKEKSSDFTLSTQNQKTDESADEIVVTNKRDTLE

[1163] M50 strain isolate ISS4538 is a GAS AI-4 strain of bacteria. ISS4538_fimbrial is thought to be a fimbrial structural subunit of M50 strain ISS 4538. An example of a nucleotide sequence encoding the ISS4538_fimbrial protein (SEQ ID NO:255) and an ISS4538_fimbrial protein amino acid sequence (SEQ ID NO:256) are set forth below.

SEQ ID NO: 255

ATGAAAAAAAATAAATTATTACTTGCTACTGCAATCTTAGCAACTGCTTT
AGGAACAGCTTCTTTAAATCAAAACGTAAAAGCTGAGACGGCAGGGGTTG
TTAGCAGTGGTCAATTAACAATAAAAAAATCAATTACAAATTTTAATGAT
GATACACTTTTGATGCCTAAGACAGACTATACTTTTAGCGTTAATCCGGA
TAGTGCGGCTACAGGTACTGAAAGTAATTTACCAATTAAACCAGGTATTG
CTGTTAACAATCAAGATATTAAGGTTTCTTATTCTAATACTGATAAGACA
TCAGGTAAAGAAAAACAAGTTGTTGTTGACTTTATGAAAGTTACTTTTCC
TAGCGTTGGTATTTACCGTTATGTTGTTACCGAGAATAAAGGGACAGCAG
AAGGAGTTACATATGATGATACAAAATGGTTAGTTGACGTCTATGTTGGT
AATAATGAAAAGGGAGGTCTTGAACCAAAGTATATTGTATCTAAAAAAGG
AGATTCTGCTACTAAAGAACCAATCCAGTTTAATAATTCATTCGAAACAA
CGTCATTAAAAATTGAAAAGAAAGTTACTGGTAATACAGGAGATCATAAA
AAAGCATTTAACTTTACATTAACATTGCAACCAAATGAATACTATGAGGC
AAGTTCGGTTGTGAAAATTGAAGAGAACGGACAAACGAAAGATGTGAAAA
TTGGGGAGGCATATAAGTTTACTTTGAACGATAGTCAGAGTGTGATATTG
TCTAAATTACCAGTTGGTATTAATTATAAAGTTGAAGAAGCAGAAGCTAA
TCAAGGTGGATATACTACAACAGCAACTTTAAAAGATGGAGAAAAGTTAT
CTACTTATAACTTAGGTCAGGAACATAAAACAGACAAGACTGCTGATGAA
ATCGTTGTCACAAATAANCGNGACACTCNAGTTCCAACNGGTGTNGTAGG
CACCCCNCCTCCATTCNCAGTTCTTANCATTGNGGCTANTGGTGGNGTNA
TNTATNTTACAAAACGNAAAAAAGNATAA

SEQ ID NO: 256

MKKNKLLLATAILATALGTASLNQNVKAETAGVVSSGQLTIKKSITNFND
DTLLMPKTDYTFSVNPDSAATGTESNLPIKPGIAVNNQDIKVSYSNTDKT
SGKEKQVVVDFMKVTFPSVGIYRYVVTENKGTAEGVTYDDTKWLVDVYVG
NNEKGGLEPKYIVSKKGDSATKEPIQFNNSFETTSLKIEKKVTGNTGDHK
KAFNFTLTLQPNEYYEASSVVKIEENGQTKDVKIGEAYKFTLNDSQSVIL
SKLPVGINYKVEEAEANQGGYTTTATLKDGEKLSTYNLGQEHKTDKTADE
IVVTNXRDTXVPTGVVGTPPPFXVLXIXAXGGVXYXTKRKKX

[1164] Examples of GAS AI-5 sequences from M2 strain isolate 10270 are set forth below.

[1165] MGAS10270_Spy0107 is a 33 kDa chaperonin which flanks GAS AI-5. An example of an amino acid sequence for MGAS10270_Spy0107 is shown below as SEQ ID NO:296.

SEQ ID NO: 296

MDKIIKSIAQSGAFRAYVLDSTETVALAQEKHNTLSSSTVALGRTLIANQ
ILAANQKGDSKITVKVIGDSSFGHIISVADTKGHVKGYIQNTGVDIKKTA
TGEVLVGPFMGNGHFVTIIDYGTGNPYTSTTPLITGEIGEDFAYYLTESE
QTPSAIGLNVLLDENDKVKVAGGFMVQVLPGASEEEIARYEKRLQEMPAI
SYLLASKNHVDALLEAIYGDEPYKRLSEEPLSFQCDCSRERFEAALMTLP
KADLQAMIDEDKGAEIVCQFCGTKYQFNESDLEAIINDKA

[1166] MGAS10270_Spy108 is a transcriptional regulator (RofA). An example of an amino acid sequence for MGAS10270_Spy108 is shown below as SEQ ID NO:297.

SEQ ID NO: 297

MISIFSLDRIEIGEYTYQRLIWLSKCRKRGPLSLIEKYLESSIESKCQLV
VLFFKTSYLPITEVAEKTGLTFLQINHYCEELNAFFPGSLSMTIQKRMIS
CQFTHPFKETYLYQLYASSNILQLLAFLIKNGSHSRPLTDFARSHFLSNS
SAYRMREALIPLLRNFELKLSKNKIVGEEYRIRYLIALLYSKFGIKVYDL
TQQDKNIIHSFLSHSSTHLKTSPWLSESFSFYDILLALSWKRHQFSVTIP
QTRIFQQLKKLFVYDSLKKSSRDIIETYCQLNFSAGDLDYLYLIYITANN
0SFASLQWTPEHIRQCCQLFEENDTFRLLLNPIITLLPNLKEQKASLVKA
LMFFSKSFLFNLQHFIPETNLFVSPYYKGNQKLYTSLKLIVEEWMAKLPG
KRYLNHKHFHLFCHYVEQILRNIQPPLVVVFVASNFINAHLLTDSFPRYF
SDKSIDFHSYYLLQDNVYQIPDLKPDLVITHSQLIPFVHHELTKGIAVAE
ISFDESILSIQELMYQVKEEKFQADLTKQLT

[1167] MGAS10270_Spy109 is a hypothetical protein. An example of an amino acid sequence for MGAS10270_Spy109 is shown below as SEQ ID NO:298. It contains a motif indicative of a cell wall anchor, IpxTG (SEQ ID NO:133).

SEQ ID NO: 298

MKLSKKLLYSAVVLATVAGPTVSPVAQFATSGIVVRAEDTRVPSQTQPDK
TTVNIYKLQGADFSKQPEGIKNENGEPIDITKLKDTFGTAVTYLPGVKFK
YYKVKNYSTSDDVLKSIKTVEQADSKTDLLDVAGAKETEATDQSGKVSID
LPSNDKVKYLFVESSNQDTVNKVVGYTAVPFILHLPVSNSNGKGYYDEVN
VYPKNTTVNEPKVDKDVTKLGKDDDTYQIGDKITWFLKSTVPSNIKTLDK
FGFTDTLNKGLSFIGDKTQTVTKVQFGTTVLSPDTDYTVEILDSKLTVSL
TSAGIEKVSGLVASKQLITEAEKLYKAEDNTDEAAFLSVEVNAKLNADAV
MGSRIENDVELDYGHESDIYKSKVPTNEVPEVHTGGARFEKVDATNQTDK
LQDAEFGLYSNIEATETVKWTEELLKANEAAINAGKFKESNTTVGTPITF
KSASDGSFEIKGLRYGDDSTNTRSDGTVGTAEKTGKTTYYIKELVAPKGY
VVSQDIVQFDVTYSSYYKDPTKVTLGTEAGDAAPTSVKNNKRPSIPNTGG
IGTAIFVAIGAAVMAFAAKGMKRRTEEN

[1168] MGAS10270_Spy0110 is a hypothetical protein. An example of an amino acid sequence for MGAS10270_Spy0110 is shown below as SEQ ID NO:299. It contains a motif indicative of a cell wall anchor, IpxTG (SEQ ID NO:133).

SEQ ID NO: 299

MKQTLKLMVSFLVMLGTMFGISQTVLAQGTHQLTIVHLEARDIDRPYPQL
DIAPKEGTPTEGVLYQLYQLKSTEDGDLLAHWNSLTITELKKQAQQVFEA
TTNQQGKATFNQLPDGTYYGLAVKAGEKDRNVSAFLVDLSEDKVIYPKII
WSTGELDLLKVGVDGDTKKPLAGVVFELYEKDGMVPIRVKNGVHSQDIDA
AKRLETDSSGHIRISGLIPGDYVLKEIETRSGYQIDQSETAVTIEKSKTV
TVTIKNQKIPSPKVPPRGGFIPKTGEQQAMILVIIGGILIALALRLLSKH
RKNQDKH

[1169] MGAS10270_Spy0111 is a sortase. An example of an amino acid sequence for MGAS10270_Spy0111 is shown below as SEQ ID NO:300.

SEQ ID NO: 300

MRKRSKTSLATNIRIWIFRLIFLAGFLVLAFPIVSQITYYQASHANINAF
KKAVAKIDQSEINRRLELAYAYNASIAGARKTGEHPVLKDPYSAEQKQAG
VIEYARMLEVKEQIGHVIIPRINQDIPIYAGSAEENLQRGVGHLEGTSLP
VGGESTHAVLTAHRGLPTAKLFTNLDKVTVGDRFYIEHIGGKIAYQVDQI
KVISPDQLEDLYVIQGEDHITLLTCTPYMINSHRLLVRGKRIPYVKKAVQ
KEAETFRQKQYLTYAIWVIVGLILLSFLIWFKKTKQKKRRENEKATSQIS
HNKSK

[1170] MGAS10270_Spy0112 is a sortase. An example of an amino acid sequence for MGAS10270_Spy0112 is shown below as SEQ ID NO:301.

SEQ ID NO: 301

MKKRLAKLATTIRNNKIRTLIFLLGSLILLFPIVSQVSYYLASHQNINRF
EREVSKMDTSAIDRRIALAKAYNETVSRNPLVIDPFTRKQKEGLREYARM
LEVHEQIGHVAVPSIGVDIPIYAGTAESVLQKGSGHLEGTSLPVGGQSTH
AVLTAHRGLPTARLFTDLNKVKKGQIFYVTNIKETLAYKVVSIKVVNPTA
LSTVKVVKGKDYMTLLTCTPYMINSHRLLIKGERIPYDSTKAEKCKEQAI
QGYHLSLVLKILLGLLIGLFIVIMMRRWMKHRQ

[1171] MGAS10270_Spy0113 is a collagen adhesion protein. An example of an amino acid sequence for MGAS10270_Spy0113 is shown below as SEQ ID NO:302. It contains a motif indicative of a cell wall anchor, FPxTG (SEQ ID NO:141).

SEQ ID NO: 302

MKKKQKLWRGLSVTLLILSQIPFGILVQGETQDNNPALGKVIVKKTGENA
NPLGKATFVLKNDHDKSEISHETVEGSGEAAFENIKPGNYTLTEKTAPIG
YKKTDKTWKVKVADNGATTIEDIDPDKVEKRKEALNGQYPESAIYEDTKE
SYPLVKVEDSKVGNQYKALNPINGEDGRREITEGWLSKKIKKVNELDKNK
YKIELTVEGKTIVETKELNQPLDVVLLLDNSNSMNNERAHNSQRALKAGE
AVEKLIDKITSNKDNRVALVTYASTIFDGTEATVSKGVADRNGKALNDSV
SWDYHKTTFTATTHNYSYLNLTNDANEVNILKSRIPKEAEHINGNRTLYQ
FGATFTQKALMKANEILETQSSNDRKKVIFHVTDGVPTMSYAINFNPYIS
TSYQNQFKSFLNKTPDRSGILQEDFIINGDDYQIVKGDGESFKLFSDRKV
PVPGGTTQAAYQVPQNQLSVMSNEGYAINRGYIYLYWRDYNWVYPFDPKT
KTVSATKQIKTHGEPTTLYFNGNIKPKGYDIFTVGIGVNGDPGATPLEAK
EFMQSISSKTENYTNVDDTNKIYDELNKYFKTIVEEKHSIVDGNVTDPMG
EMIEFQLKDGQSFTHDDYVLVGNDGSQLKNGVALGGPNSDGGILKDVTVT
YDKTSQTIKINHLNLGSGQKVVLTYDVRLKENYISNKFYNTNNRTTLSPK
SEKEPNTIRDFPIPKIRDVREFPVLTISNQKKMGEVEFIKVNKDKHSESL
LGAKFQLQIEKDFSGYKQFVPEGSDVTTKNDGKIYFKALQDGNYKLYEIS
SPDGYIEVKTKPVVTFTIQNGEVTNLKQDPNANKNQIGYFEEDGKHLITN
TPKRPPSVFPKTGGIGTIVYILVGCTLMIVATGSFRRNQQ

[1172] MGAS10270_Spy0114 is a hypothetical protein. An example of an amino acid sequence for MGAS10270_Spy0114 is shown below as SEQ ID NO:303.

SEQ ID NO: 303
MISSYLSLLSVIGLAKAYNASLSGTSSQATQSVLRDSYSEEQKRQGGLNTLGC

[1173] MGAS10270_Spy0115 is a sortase. An example of an amino acid sequence for MGAS10270_Spy0115 is shown below as SEQ ID NO:304.

SEQ ID NO: 304

MDKMRRGDRFYIEHLGGKLAYQVDSIKVITPDRLDDLYLVPGKDYVTLLT
CTPYMINSHRLLVRGKRIPYKEGLEHKDQQLGHRGQLITYGFVSLGLALV
LGLLWYRQRKK

[1174] MGAS10270_Spy0116 is a sortase. An example of an amino acid sequence for MGAS10270_Spy0116 is shown below as SEQ ID NO:305.

SEQ ID NO: 305

MKQRVKQLYQFIMTNKLRSFLFVLGILVVLFPVVSQISYYHASHQQINQF
EHKAAVIDRSAIERRISLAKAYNDAISRHPSLNDPFTSKEKAGLREYARM
LEVNEQIGHVAIPKIGVDLPIYAGTSAAILEKGSGHLEGTSLPIGGLSTH
AVLTAHRGLPTARLFTDLDKVKKGDYFYVTNLKETLAYQVDRIMVIEPSQ
LDAVSIEEGKDYVTLLTCTPYMINSHRLLVRGVRTPLTSRQAKKESLTAV
RPYQYYRWLVYLAIAVLVILVMIVAKYYQKTNKSS

[1175] MGAS10270_Spy0117 is a fibronectin binding protein. An example of an amino acid sequence for MGAS10270_Spy0117 is shown below as SEQ ID NO:306. It contains a motif indicative of a cell wall anchor, LPXTG (SEQ ID NO:122).

SEQ ID NO: 306

MSIVTNKTLHKVLVKLAAILAILFLVLPTGLTAVTVLAEQINTENLIPVE
TAAGKILKESDLDFEQAISTSEEALKDSSASWIQLTYNKVNQNLAKQDLF
LRLPQGMTIEGIGQDQKLDVKTISVPKDLDLDEAASTINNTNIITGFEKI
GEQDYKLSFAATSKTLNLVFKVKGTSLNEKRELQLSDKQNLNQTSFTKIL
GLGIAKSDDRTSANDTTTRPSIQPRAATARETTGNQDISANLTTSNAQLN
LEDKDKNNIYDVEAPDSFMFRATLSLLDSRYIVPGNYFELKLSDTIHYNM
LNPTDINFPYLTQDGKVIAVPELVQDPPVDGLLRATGKIVRYRFTDQVQG
LDSLTMTLNLGHSVNPNVVQNNDKYDFSYQIGGHIIKQSYDVQYGKPKEN
GNLNVHQRLTYTDSKENLKASSLIYVNPKQTPQYAGKQTLSILRNPKTYT
ISEQTVPNLLELNNQTSIKVYKLKDSKGVTDAVNLDKQYLEEVINPIITK
SDGKIEVSFNYTQGETSAYVVAVETSLQQEGSQPVFIAQNSNLTSASTRK
KVSETDATATVGSGGSASGDQTPKGTLYLNKVDTNHKHLANATFTLSGNT
TAGQFLYRTLITDTKEVSFSDLPPGSYLLKETTAPSGYQQITTPWTVTVD
DKGKVTVTGNEADTQKVPEEAEVVILWESTKWNYGNVQFYKDRFKELVDS
VGNQNAKYTLIRYSGDTSDSAQVINQSVSSAEFNKILNSETLTASTMTNR
KGMLKAYQLALQQFQASTNKRKYLLQLTNYPIYPGYREEKDFMSQSQTSF
DAMKSLGVVPYLLVERDPYANRNTYLDPKAEASSFGAFYPSDNIKVVWSN
NSSGLFTPPTNTNYTIQIQSIGSAIKQQIPESVLTVINRASGKFSINKID
EAKKGLAGATFTLSKRTTVAVNHQVQGAFTPVSKETTAGRTTLTFDNLKP
GVYDLKETKAPNAYVLDPKTYVVVVQNSGKTTIVDEANFKEADYPMADNT
SQFDYPTKDIANKPNKIVFTKIGDGGKSLSGAEFELRKGNEKVQTTTSGA
DGKVTFSKLLPGTYEVWETRVADSAYQLPQEAVATFEVKADGTFSEPMGR
LFRKNIAQNNRYEIRNELVNKKTGNQKIKVIKKDELTDLPLPNAKFQLEA
SDGTIYTKTTDVKGEIVFEKLPYGQYILTEIEAPSGYVLDPTPHKINLTE
VDSPETEVVAGRNATQPTVAPTARAALAAPVAEPVTGKNVSDQISIKELD
ITSSNEDTPRLVRPNHGENIVMRAGFTINPGSDIKAGDFFTLTLPNTIDP
FGVSAPENVDFRILGPLGTLALGTYDSSTHTITYKFTDYITRYTVSSFST
ISPFFIDRDRVKTNQDIDLFLKVGQVSSTSYHFTVDYNPYYGTADTNNPV
NVGSMITRLNQDTGDFVNYIYVNPAGQTLEQATLTFTGRGSTRIDANTRV
QLFEVTNPKLQMPPSWGIQDETLREVDPANYQLIKENGRFTINFYNDLLY
GRSYIVKVSGKSDKNDPDPIHTSAILTQRYFNDYPYYTPSGRYIPYGPYT
ESFTFTAEVVKKSGESNADGSVVVRLSNRKNYIDFMKSNSQGTPLEATFE
LRKKATNDTVTVGTPVISDKTTGKFYFEGLSPGDYEVWETKAPDGYTKPV
EAVATFKVTDEGEIVDKSLEDGRIINYKRPELPATGGPGIFVYLFIGSAM
CLVAIFWDHSFRFTK

[1176] MGAS10270_Spy0118 is a hypothetical protein which flanks GAS AI-5. An example of an amino acid sequence for MGAS10270_Spy0118 is shown below as SEQ ID NO:307.

SEQ ID NO: 307

MKRYNKYLFTSLLAASMLFSSYKSVHAHDNIDEKGKVHLYWQGNYYVDNY
VDYTKTLVDNNNSIEWTVTFNSAKEQWVYPDFSVFLPKGVKAPKEITYEH
HYWDGTVDSKTRRNTKWHYDWESQQTNFNQEFDKFPGYTGWSPSLDKFYK
LKNEGKFSHVLVDTYGRQSHTYFSHKMVWKFKTELEEDYKNKWDKLPFIA
GIKQNNPLAASFPSYKGEFGE

[1177] Examples of GAS AI-6 sequences from M4 strain isolate 10750 are set forth below.

[1178] MGAS10750_Spy0112 is a 33 kd chaperonin which flanks GAS AI-6. An example of an amino acid sequence for MGAS10750_Spy0112 is shown below as SEQ ID NO:308.

SEQ ID NO: 308

MDKIIKSIAQSGAFRAYVLDSTETVALAQEKHNTLSSSTVALGRTLIANQ
ILAANQKGDSKITVKVIGDSSFGHIISVADTKGHVKGYIQNTGVDIKKTA
TGEVLVGPFMGNGHFVTIIDYGTGNPYASTTPLITGEIGEDFAYYLTESE
QTPSAIGLNVLLDENDKVKVAGGFMVQVLPGASEEEIARYEKRLQEMPAI
SHLLASKNHVDALLEAIYGDEPYKRLSEEPLSFQCDCSRERFEAALMTLP
KADLQAMIDEDKGAEIVCQFCGTKYQFNESDLEALINDKA

[1179] MGAS10750_Spy0113 is a transcriptional regulator, rofA. An example of an amino acid sequence for MGAS10750_Spy0113is shown below as SEQ ID NO:309.

SEQ ID NO: 309

MISIFSLDRIEIGEYTYQRLIWLSKCRKRGPLYLIEKYLESSIESKCQLV
VLFFKTSYLPITEVAEKTGLTFLQLNHYCEELNAFFPGSLSMTIQKRMIS
CQFTHPFKETYLYQLYASSNVLQLLAFLIKNGSHSRPLTDFARSHFLSNS
SAYRMREALIPLLRNFELKLSKNKIVGEEYRIRYLIALLYSKFGIKVYDL
TQQDKNTIHSFLSHSSTHLKTSPWLSESFSFYDILLALSWKRHQFSVTIP
QTRIFQQLKKLFVYDSLKKSSHDIIETYCQLNFSAGDLDYLYLIYITANN
SFASLQWTPEHTRQCCQLFEENDTFRLLLNPIITLLPNLKEQKASLVKAL
MFFSKSFLFNLQHFIPETNLFVSPYYKGNQKLYTSLKLIVEEWMAKLPGK
RYLNHKHFHLFCHYVEQILRNIQPPLVVVFVASNFINAHLLTDSFPRYFS
DKSIDFHSYYLLQDNVYQIPDLKPDLVITHSQLIPFVQHELTKGIAVAEI
SFDESILSIQELMYQVKEEKFQADLTKQLT

[1180] MGAS10750_Spy0114 is a fibronectin binding protein. An example of an amino acid sequence for MGAS10750_Spy0114 is shown below as SEQ ID NO:310. It contains a motif indicative of a cell wall anchor, LPXTG (SEQ ID NO:122).

SEQ ID NO: 310

MVSSYMFVRGEKMNNKMFLNKEAGFLAHTKRKRRFAVTLVGVFFMLLAYA
GAIGFGQVAYAADEKTVPNFKSPDPDYPWYGYDAYGKGYPGYDISKYYHD
LRVNLNGSQVYQVYCFNIQKIFPYNVKSVTQKWFKKVEGNSDTFGLYAMN
PRVQGEELSQKLRSVMYNAYPKNANNIMDGLDTLNAIKVTQSAVWYYSDK
SEFEVDKQWESELNNHEIDQEQVTLMREALRKLISSNLEETVEKKLPENY
KLNIFNPQDTSIQHLLSAEFVPENPPRPGETPEYGPKTPELDGSPIPEDP
KHPDDNLEPTLPPVMLDGEEVPEVPSESLEPALPPLMPELDGQEVPEVPS
ESLEPALPPLMPELDGQEVPEKPSIDLPIEVPRYEFNNKDQSPLAGESGE
TEYITEVYGNQQNPVDIDKKLPNETGFSGNMVETEDTKEPEVLMGGQSES
VEFTKDTQTGMSGFSETATVVEDTRPKLVFHFDNNEPEVEENREKPTKNI
TPILPATGDIENVLAFLGILILSVLSIFSLLKNKQNKKV

[1181] MGAS10750_Spy0115 is a fibronectin binding protein. An example of an amino acid sequence for MGAS10750_Spy0115 is shown below as SEQ ID NO:311. It contains a motif indicative of a cell wall anchor, FPXTG (SEQ ID NO:141).

SEQ ID NO: 311

MYSRLKRELVIVINRKKKYKLIRLMVTLGLIFSQLAPPFGTLMALSGHSR
SKSPVTEVKADNVSTLKTGSFKLKKFDEDGKTPIKDVTFQLTSETNPSNY
KIEQITSGAGDASFANIPPGTYLLKEVAPPSGYQVMADYYRITVSPDGYT
QYTYVKVGTTTSSPTTSLPSTSGGGTGGTVFRTSKTSGVVTVTDYNFTTK
NKAQGNTDYTTLWATSGEFFDMSFKLKVNEGTQAGDSFTIKLSDYLSPNG
IREKFISAPPLMLDKKVVATGIYDESTNSYIYTFNDLINHKQNAEITVNY
TFSPEAKKVDRDWYVNTYNITNIIDGQKQDSGNFTIDYGQGQYMTGTLNS
GLRLRNNITYLNRTTGEVEYTIYLNNGASPRDKDFTVKNPVTGRHFLNLE
DKSASVAFTQKNITVYRVPLSQKTSKMPYSMSGETDGLESIPFDYSSKGI
TFTKESFHDNETNSNTAGLLIKIKAYITADNKRSADVSLSAGWTYTNLIR
SRSDAKASAFELGNTSSGVANNIEPTVTIRNYKIKKGSIVFTKQDVETKM
TLSGVAFRLEKKEENDWQIVEKYKDVQTGTEGKLILSDLDPGEYQLIETK
PLDGYLVSSGPVVTFTITDQGTEGTVKPSDKIIPNTKPGKQKIKVIKKDE
QSRVPLAGAKFQLESNKGVVLTGETDGKGEYTFTNLPFGDYILTEIAAPK
GYILDKTPRSIAIGDTVDKEPEPTVVEAATPRTVRSVSPSATVSDKDVSR
NILVKKVEFTTTNGQTPLQVKPNQGENLIARSEFELKKEIDIKKGDYFAV
KLSDNIDPFGVSTGETTTFNITGPYGTLAVGKYDSKSRSIIYTFTDYVEK
YEVSNFSTILPYFIDRYAVTRDADINISTSVGSQTNTARVRVLYTPYYGA
TDSYSPVNIGSMITKLDEKNGTFTNYIYINPMQQFIRNGKLTFQGGGSAI
IDNETQVTLFKVNNSTDMPPSWGITDSTLRVENDILVNKKQGEISVDFEN
ILEARNSFIMKVVGKIASSGTSVRTSATLSQKYDNTYGYYSTNGRWIPKG
PYSEYYRYDTTAILHSGDSNVDGAIRISVTNRKNSVAFTKTNGLEKPLEA
TFELRRLNSNKTFTSVKTTKSTKDTGKFSFEGMESGSYEVWETQSPEGYL
KPDKAVATFKVDKDGTIKDLTPDNGKIINYPNTAKIIFTKMLASEKEELS
PATKEKSATFSLWRLKEESLKETNTVSQAYDEQYYEPVMENNSVRTVTSD
SSGNVLFDKLSPGFYAIKEEKAPDGYVKQQGIVRIFQVDSSGKVIKYQYF
KDKSIAGKLTEITDLETEQLKQFNEIINKKFVFPMTGGQGIALLMIIGGT
MMGIAYFGHRRKQRLND

[1182] MGAS10750_Spy0116 is a cell wall surface anchor family protein. An example of an amino acid sequence for MGAS10750_Spy0116 is shown below as SEQ ID NO:312. It contains a motif indicative of a cell wall anchor, IPXTG (SEQ ID NO:133).

SEQ ID NO: 312

MKTKIFSRLAAVLLVLGSLLPTVVAVAEAESSHKTDVVIHKIKMTSLKGW
PKEKNPDGTYTGLGDKNYNGEKIDTITSYFGEGAEELDGVSFTYWSVDKE
KYKKLTKNPQNYDTVPKMKAFLQGTEKNKALENSSETIDGKTTGHTADKG
GVKVKDLADGYYWFVENSGSNIANGETLSSSAAVPFGLELPVYKADGSTI
TELHVYPKNTTTKPKIDKNFSKDEKDAALAGGANYDYYQKDKGYVSRIIG
SEVSYQIKTEIPAGAQYQTLRWEDTMTKGLTYKAGSLELTITTKGDGKAA
LNFEFQTDYKLTENQSGFVLKFTESGLEKVKKAVQATKDAKGQVTADGHP
MTVDISYKATVNSDAVVDQPDKNTVIFDYSNNPKEHKDPREKSTKPKDKQ
ITVEKTWASQSAPTGIAVTYYLYQKGDESGKDKVVDSVTLTTDYKHIFTN
LDDSKDYYVKESAIGYTPEYTEAKDGKISIKNTKDDKNPDPLKPTSPAIV
THGKKFVKTSQDDERLKGATFVVVDQKTNEKYLAIKADEKQSAEEKAYHD
TEQKYQDEVKKATTEKPNSQAIEKAKKARDDAFKKARTAYEWVSDKQKAV
KFTSNSKGQFEVTGLAAGTYYLEEVAAPTGFAKLQEKVEFTLGFNSYNGH
KDQSGQSLEGHTQYEKGTPDFGYGQRVINKKITIPQTGGIGTVIFTVVGL
AIMTVTGLMMIRRNKNDKSE

[1183] MGAS10750_Spy0117 is a cell wall surface anchor family protein. An example of an amino acid sequence for MGAS10750_Spy0117 is shown below as SEQ ID NO:313. It contains a motif indicative of a cell wall anchor, IPXTG (SEQ ID NO:133).

SEQ ID NO: 313

MGGTQLKIGRLIRLMLSICACLYFLTSPIFALQKTSSVTIHFENSDKDTQ
LALWQLPEGQTLPELETLFEKTDAELTRQYPQVSTVTVPKGETKLVLSNL
PVGAIYYVREAEERLGVRSLAPFILKVDTDDDQAVYTKKAKAQKRGSYPF
VKVSAQGGSLEGATFEVWKQTQKQLQPVIKGSSRYLLTSSKDGSFMARDL
PFGSYVLKEITAPKGYLLSKKTIPFEVTDYSEKQAPVKVVNQPKIPPRIE
IPYTGNAIMILVVLLGFALFTLGVYLVRRNG

[1184] MGAS10750_Spy0118 is a sortase. An example of an amino acid sequence for MGAS10750_Spy0118 is shown below as SEQ ID NO:314.

SEQ ID NO: 314

MKKQSKRHRLNQNIALIVVFLIGLTILLYPQISRIYYTIESNYQSKQFDR
EKSTLHQEDISQRIALAKAFNASLHDVDLKDPYSDDEKTKGPAEYARMLE
LHEQIGHVEIPKIRVDLPIYAGTSDEIISKGSGHLEGTSLPVGGENTHTV
LTSHSGLPSAKLFSDLAKLKKGDIFYIHNIKEILAYQIDQIKIIEPDNFS
DLLIVPGKDYATLLTCTPVGINTHRLIVRGHRVPYVSNEHKNNKQKASSG
YMCYLFVLLALLTLLFGYWFYRQKKKKSQKVKREEFHAKE

[1185] MGAS10750_Spy0119 is a sortase. An example of an amino acid sequence for MGAS10750_Spy0119 is shown below as SEQ ID NO:315.

SEQ ID NO: 315

MLKNKQSLSLRERLIQVMFPLLFLMGCLIVLYPLMSNYYYRVKQNQAVTS
FESAKVIVNKDDIKRRMALARAYNATLDPGRINDPYTDLEKKGVAEYARM
LELNEQIGYVEVPRFDINLPIYAGTSDDVLQKAAGHLEGTSLPIGGDSTH
TVITAHTGLPQAKLFTNIHKMKKGDLFFIHNIDKTLAYKVDQILVVEPDN
FTPVLVKNGFDYATLLTCTPYGINSHRLLVRGYRVPYQKAFEKADAQRPW
YTKVIFLVSFLLFVILVIILLIDWHRK

[1186] MGAS10750_Spy0120 is a sortase. An example of an amino acid sequence for MGAS10750_Spy0120 is shown below as SEQ ID NO:316.

SEQ ID NO: 316

MSKQKCVGYVLMILGLGLPLFFLTLMSLNQFQEQVAYQKFQTENRSWKNS
QKEWVNRHNQEQALADRATTDPFVDAQNQLKQSPFDDNIIGYIIIPKLRM
AQPIRVGASERHLEKGVAQVTGTSLPIGGLGTRSVIAGHRSWYDNERFLR
IAELSLGDQIVIDLGVYQLEYRVKSVEIIDAKDWRQLTAKKSQDLITLLT
CNPLYPPFNERLLVMQRECCLAFLIYQLKREIRWINLN

[1187] MGAS10750_Spy0121 is a hypothetical protein which flanks GAS AI-6. An example of an amino acid sequence for MGAS10750_Spy0121 is shown below as SEQ ID NO:317.

SEQ ID NO: 317

MKRCNKYLFTSLLAASMLFSSYKSVHAHDNIDEEGKVHLYWQGNYYVDNY
VDYTKKLVNNSIEWTVTFNSAKEQWVYPDFSVFLPKGVKAPKEITYEHHY
GNGTVDSKKRSNTQWHYDWEKQKTNFNQEFDKFPGYTGWSRSLDKFYKLK
NEGKFSHVLVDTYGRQSHTYFSHKMVWKFKTELEDNYKDKWNKLPFIAGI
KQNNPLAASFPSYKGEFGE

[1188] There may be an upper limit to the number of GAS proteins which will be in the compositions of the invention. Preferably, the number of GAS proteins in a composition of the invention is less than 20, less than 19, less than 18, less than 17, less than 16, less than 15, less than 14, less than 13, less than 12, less than 11, less than 10, less than 9, less than 8, less than 7, less than 6, less than 5, less than 4, or less than 3. Still more preferably, the number of GAS proteins in a composition of the invention is less than 6, less than 5, or less than 4. Still more preferably, the number of GAS proteins in a composition of the invention is 3.

[1189] The GAS proteins and polynucleotides used in the invention are preferably isolated, i.e., separate and discrete, from the whole organism with which the molecule is found in nature or, when the polynucleotide or polypeptide is not found in nature, is sufficiently free of other biological macromolecules so that the polynucleotide or polypeptide can be used for its intended purpose.

### Examples Other Gram Positive Bacterial Adhesin Island Sequences

[1190] The Gram positive bacteria AI polypeptides of the invention can, of course, be prepared by various means (e.g. recombinant expression, purification from a gram positive bacteria, chemical synthesis etc.) and in various forms (e.g. native, fusions, glycosylated, non-glycosylated etc.). They are preferably prepared in substantially pure form (i.e. substantially free from other streptococcal or host cell proteins) or substantially isolated form.

[1191] The Gram positive bacteria AI proteins of the invention may include polypeptide sequences having sequence identity to the identified Gram positive bacteria proteins. The degree of sequence identity may vary depending on the amino acid sequence (a) in question, but is preferably greater than 50% (e.g. 60%, 65%, 70%, 75%, 80%, 85%, 90%, 91%, 92%, 93%, 94%, 95%, 96%, 97%, 98%, 99%, 99.5%, or more). Polypeptides having sequence identity include homologs, orthologs, allelic variants and mutants of the identified Gram positive bacteria proteins. Typically, 50% identity or more between two proteins is considered to be an indication of functional equivalence. Identity between proteins is preferably determined by the Smith-Waterman homology search algorithm as implemented in the MPSRCH program (Oxford Molecular), using an affinity gap search with parameters gap open penalty=12 and gap extension penalty=1.

[1192] The Gram positive bacteria adhesin island polynucleotide sequences may include polynucleotide sequences having sequence identity to the identified Gram positive bacteria adhesin island polynucleotide sequences. The degree of sequence identity may vary depending on the polynucleotide sequence in question, but is preferably greater than 50% (e.g. 60%, 65%, 70%, 75%, 80%, 85%, 90%, 91%, 92%, 93%, 94%, 95%, 96%, 97%, 98%, 99%, 99.5% or more).

[1193] The Gram positive bacteria adhesin island polynucleotide sequences of the invention may include polynucleotide fragments of the identified adhesin island sequences. The length of the fragment may vary depending on the polynucleotide sequence of the specific adhesin island sequence, but the fragment is preferably at least 10 consecutive polynucleotides, (e.g. at least 10, 12, 14, 16, 18, 20, 25, 30, 35, 40, 50, 60, 70, 80, 90, 100, 150, 200 or more).

[1194] The Gram positive bacteria adhesin island amino acid sequences of the invention may include polypeptide fragments of the identified Gram positive bacteria proteins. The length of the fragment may vary depending on the amino acid sequence of the specific Gram positive bacteria antigen, but the fragment is preferably at least 7 consecutive amino acids, (e.g. 8, 10, 12, 14, 16, 18, 20, 25, 30, 35, 40, 50, 60, 70, 80, 90, 100, 150, 200 or more). Preferably the fragment comprises one or more epitopes from the sequence. The fragment may comprise at least one T-cell or, preferably, a B-cell epitope of the sequence. T- and B-cell epitopes can be identified empirically (e.g., using PEPSCAN [Geysen et al. (1984) PNAS USA 81:3998-4002; Carter (1994) Methods Mol. Biol. 36:207-223, or similar methods], or they can be predicted (e.g., using the Jameson-Wolf antigenic index [Jameson, B A et al. 1988, CABIOS 4(1): 1818-186], matrix-based approaches [Raddrizzani and Hammer (2000) Brief Bioinform. 1(2):179-189], TEPITOPE [De Lalla et al. (199) J. Immunol. 163:1725-1729], neural networks [Brusic et al. (1998) Bioinformatics 14(2):121-130], OptiMer & EpiMer [Meister et al. (1995) Vaccine 13(6):581-591; Roberts et al. (1996) AIDS Res. Hum. Retroviruses 12(7):593-610], ADEPT [Maksyutov & Zagrebelnaya (1993) Comput. Appi. Biosci. 9(3):291-297], Tsites [Feller & de la Cruz (1991) Nature 349(6311):720-721], hydrophilicity [Hopp (1993) Peptide Research 6:183-190], antigenic index [Welling et al. (1985) FEBS Lett. 188:215-218] or the methods disclosed in Davenport et al. (1995) Immunogenetics 42:392-297, etc. Other preferred fragments include (1) the N-terminal signal peptides of each identified Gram positive bacteria protein, (2) the identified Gram positive bacteria protein without their N-terminal signal peptides, (3) each identified Gram positive bacteria protein wherein up to 10 amino acid residues (e.g. 1, 2, 3, 4, 5, 6, 7, 8, 9, 10, 15, 20, 25 or more) are deleted from the N-terminus and/or the C-terminus e.g. the N-terminal amino acid residue may be deleted. Other fragments omit one or more domains of the protein (e.g. omission of a signal peptide, of a cytoplasmic domain, of a transmembrane domain, or of an extracellular domain), and (4) the polypeptides, but without their N-terminal amino acid residue.

[1195] As indicated in the above text, nucleic acids and polypeptides of the invention may include sequences that:
[1196] (a) are identical (i.e., 100% identical) to the sequences disclosed in the sequence listing;
[1197] (b) share sequence identity with the sequences disclosed in the sequence listing;
[1198] (c) have 1, 2, 3, 4, 5, 6, 7, 8, 9, or 10 single nucleotide or amino acid alterations (deletions, insertions, substitutions), which may be at separate locations or may be contiguous, as compared to the sequences of (a) or (b);
[1199] (d) when aligned with a particular sequence from the sequence listing using a pairwise alignment algorithm, a moving window of x monomers (amino acids or nucleotides) moving from start (N-terminus or 5′) to end (C-terminus or 3′), such that for an alignment that extends to p monomers (where p>x) there are p−x+1 such windows, each window has at least xy identical aligned monomers, where: x is selected from 20, 25, 30, 35, 40, 45, 50, 60, 70, 80, 90, 100, 150, 200; y is selected from 0.50, 0.60, 0.70, 0.75, 0.80, 0.85, 0.90, 0.91, 0.92, 0.93, 0.94, 0.95, 0.96, 0.97, 0.98, 0.99; and if xy is not an integer then it is rounded up to the nearest integer. The preferred pairwise alignment algorithm is the Needleman-Wunsch global alignment algorithm [Needlman &Wunsch (1970) J. Mol. Biol. 48, 443-453], using default parameters (e.g., with Gap opening penalty=10.0, and with Gap extension penalty=0.5, using the EBLOSUM62 scoring matrix). This algorithm is conveniently implemented in the needle tool in the EMBOSS package [Rice et al. (2000) Trends Genet. 16:276-277].

[1200] The nucleic acids and polypeptides of the invention may additionally have further sequences to the N-terminus/5′ and/or C-terminus/3′ of these sequences (a) to (d).

[1201] All of the Gram positive bacterial sequences referenced herein are publicly available through PubMed on GenBank.

Streptococcus pneumoniae Adhesin Island Sequences

[1202] As discussed above, a S. pneumoniae AI sequence is present in the TIGR4 S. pneumoniae genome. Examples of S. pneumoniae AI sequences are set forth below.

[1203] SrtD (Sp0468) is a sortase. An example of an amino acid sequence of SrtD is set forth in SEQ ID NO:80.

SEQ ID NO: 80

MSRTKLRALLGYLLMLVACLIPIYCFGQMVLQSLGQVKGHATFVKSMTTE
MYQEQQNHSLAYNQRLASQNRIVDPFLAEGYEVNYQVSDDPDAVYGYLSI
PSLEIMEPVYLGADYHHLGMGLAHVDGTPLPLDGTGIRSVIAGHPAEPSH
VFFRHLDQLKVGDALYYDNGQEIVEYQMMDTEIILPSEWEKLESVSSKNI
MTLITCDPIPTFNKRLLVNFERVAVYQKSDPQTAAVARVAFTKEGQSVSR
VATSQWLYRGLVVLAFLGILFVLWKLARLLRGK

[1204] SrtC (Sp0467) is a sortase. An example of an amino acid sequence of SrtC is set forth in SEQ ID NO:81.

SEQ ID NO: 81

MSRYYYRIESNEVIKEFDETVSQMDKAELEERWRLAQAFNATLKPSEILD
PFTEQEKKKGVSEYANMLKVHERIGYVEIPAIDQEIPMYVGTSEDILQKG
AGLLEGASLPVGGENTHTVITAHRGLPTAELFSQLDKMKKGDIFYLHVLD
QVLAYQVDQIVTVEPNDFEPVLIQHGEDYATLLTCTPYMINSHRLLVRGK
RIPYTAPIAERNRAVRERGQFWLWLLLGAMAVILLLLYRVYRNRRITVKG
LEKQLEGRHVKD

[1205] SrtB (SP0466) is a sortase. An example of an amino acid sequence of SrtB is set forth in SEQ ID NO:82.

SEQ ID NO: 82

MAVMAYPLVSRLYYRVESNQQIADFDKEKATLDEADIDERMKLAQAFNDS
LNNVVSGDPWSEEMKKKGRAEYARMLEIHERMGHVEIPVIDVDLPVYAGT
AEEVLQQGAGHLEGTSLPIGGNSTHAVITAHTGLPTAKMFTDLTKLKVGD
KFYVHNIKEVMAYQVDQVKVIEPTNFDDLLIVPGHDYVTLLTCTPYMINT
HRLLVRGHRIPYVAEVEEEFIAANKLSHLYRYLFYVAVGLIVILLWIIRR
LRKKKKQPEKALKALKAARKEVKVEDGQQ

[1206] Sp0465 is a hypothetical protein. An example of an amino acid sequence of Sp0465 is set forth in SEQ ID NO:83.

SEQ ID NO: 83

MFLPFLSASLYLQTHHFIAFPNRQSYLLRETRKSHFFLIHHPF

[1207] RrgC (SP0464) is a cell wall surface anchor family protein. RrgC contains a sortase substrate motif VPXTG (SEQ ID NO:137), shown in italics in SEQ ID NO:84.

SEQ ID NO: 84

MISRIFFVMALCFSLVWGAHAVQAQEDHTLVLQLENYQEVVSQLPSRDGH
RLQVWKLDDSYSYDDRVQIVRDLHSWDENKLSSFKKTSFEMTFLENQIEV
SHIPNGLYYVRSIIQTDAVSYPAEFLFEMTDQTVEPLVIVAKKTDTMTTK
VKLIKVDQDHNRLEGVGFKLVSVARDVSEKEVPLIGEYRYSSSGQVGRTL
YTDKNGEIFVTNLPLGNYRFKEVEPLAGYAVTTLDTDVQLVDHQLVTITV
VNQKLPRGNVDFMKVDGRTNTSLQGAMFKVMKEESGHYTPVLQNGKEVVV
TSGKDGRFRVEGLEYGTYYLWELQAPTGYVQLTSPVSFTIGKDTRKELVT
VVKNNKRPRIDVPDTGEETLYILMLVAILLFGSGYYLTKKPNN

[1208] RrgB (Sp0463) is a cell wall surface anchor protein. RrgB contains a sortase substrate motif IPXTG (SEQ ID NO:133), shown in italics in SEQ ID NO:85.

SEQ ID NO: 85

MKSINKFLTMLAALLLTASSLFSAATVFAAGTTTTSVTVHKLLATDGDMD
KIANELETGNYAGNKVGVLPANAKEIAGVMFVWTNTNNEIIDENGQTLGV
NIDPQTFKLSGAMPATAMKKLTEAEGAKFNTANLPAAKYKIYEIHSLSTY
VGEDGATLTGSKAVPIEIELPLNDVVDAHVYPKNTEAKPKIDKDFKGKAN
PDTPRVDKDTPVNHQVGDVVEYEIVTKIPALANYATANWSDRMTEGLAFN
KGTVKVTVDDVALEAGDYALTEVATGFDLKLTDAGLAKVNDQNAEKTVKI
TYSATLNDKAIVEVPESNDVTFNYGNNPDHGNTPKPNKPNENGDLTLTKT
WVDATGAPIPAGAEATFDLVNAQTGKVVQTVTLTTDKNTVTVNGLDKNTE
YKFVERSIKGYSADYQEITTAGEIAVKNWKDENPKPLDPTEPKVVTYGKK
FVKVNDKDNRLAGAEFVIANADNAGQYLARKADKVSQEEKQLVVTTKDAL
DRAVAAYNALTAQQQTQQEKEKVDKAQAAYNAAVIAANNAFEWVADKDNE
NVVKLVSDAQGRFEITGLLAGTYYLEETKQPAGYALLTSRQKFEVTATSY
SATGQGIEYTAGSGKDDATKVVNKKITIPQTGGIGTIIFAVAGAAIMGIA
VYAYVKNNKDEDQLA

[1209] RrgA (Sp0462) is a cell wall surface anchor protein. RrgA contains a sortase substrate motif YPXTG (SEQ ID NO:186), indicated in italics in SEQ ID NO:86.

SEQ ID NO: 86

MLNRETHMKKVRKIFQKAVAGLCCISQLTAFSSIVALAETPETSPAIGKV
VIKETGEGGALLGDAVFELKNNTDGTTVSQRTEAQTGEAIFSNIKPGTYT
LTEAQPPVGYKPSTKQWTVEVEKNGRTTVQGEQVENREEALSDQYPQTGT
YPDVQTPYQIIKVDGSEKNGQHKALNPNPYERVIPEGTLSKRIYQVNNLD
DNQYGIELTVSGKTVYEQKDKSVPLDVVILLDNSNSMSNIRNKNARRAER
AGEATRSLIDKITSDSENRVALVTYASTIFDGTEFTVEKGVADKNGKRLN
DSLFWNYDQTSFTTNTKDYSYLKLTNDKNDIVELKNKVPTEAEDHDGNRL
MYQFGATFTQKALMKADEILTQQARQNSQKVIFHITDGVPTMSYPINFNH
ATFAPSYQNQLNAFFSKSPNKDGILLSDFITQATSGEHTIVRGDGQSYQM
FTDKTVYEKGAPAAFPVKPEKYSEMKAAGYAVIGDPINGGYIWLNWRESI
LAYPFNSNTAKITNHGDPTRWYYNGNIAPDGYDVFTVGIGINGDPGTDEA
TATSFMQSISSKPENYTNVTDTTKILEQLNRYFHTIVTEKKSIENGTITD
PMGELIDLQLGTDGRFDPADYTLTANDGSRLENGQAVGGPQNDGGLLKNA
KVLYDTTEKRIRVTGLYLGTDEKVTLTYNVRLNDEFVSNKFYDTNGRTTL
HPKEVEQNTVRDFPIPKIRDVRKYPEITISKEKKLGDIEFIKVNKNDKKP
LRGAVFSLQKQHPDYPDIYGAIDQNGTYQNVRTGEDGKLTFKNLSDGKYR
LFENSEPAGYKPVQNKPIVAFQIVNGEVRDVTSIVPQDIPAGYEFTNDKH
YITNEPIPPKREYPRTGGIGMLPFYLIGCMMMGGVLLYTRKHP

[1210] RlrA (Sp0461) is a transcriptional regulator. An example of an amino acid sequence for RlrA is set forth in SEQ ID NO:87.

SEQ ID NO: 87

MLNKYIEKRITDKITILNILLDIRSIELDELSTLTSLQSKSLLSILQELQ
ETFEEELTFNLDTQQVQLIEHHSHQTNYYFHQLYNQSTILKILRFFLLQG
NQSFNEFTQKEYISIATGYRVRQKCGLLLRSVGLDLVKNQVVGPEYRIRF
LIALLQFHFGIEIYDLNDGSMDWVTHMIVQSNSQLSHELLEITPDEYVHF
SILVALTWKRREFPLEFPESKEFEKLKNLFMYPILMEHCQTYLEPHANMT
FTQEELDYIFLVYCSANSSFSKDKWNQEKKTHTIQLILQHTRGKHLLSKF
KNILGNDISNSLSFLTALTFLTRTFLFGLQNLVPYYNYYEHYGIESDKPL
YHISKAIVQEWMTEQKIEGVIDQHRLYLFSLYLTETIFSSLPAIPIFIIL
NNQADVNLIKSIILRNFTDKVASVTGYNILISPPPSEEHLTEPLIIITTK
EYLPYVKKQYPKGKHHFLTIALDLHVSQQRLIYQTIVDIRKEAFDKRVAM
IAKKAHYLL

[1211] As discussed above, a S. pneumoniae AI sequence is present in the S. pneumoniae strain 670 genome. Examples of S. pneumoniae AI sequences are set forth below.

[1212] Orf1_{—}670 is a transposase. An example of an amino acid sequence of orf1_{—}670 is set forth in SEQ ID NO:171.

SEQ ID NO: 171

MEHINHTTLLIGIKDKNITLNKAIQHDTHIEVFATLDYHPPKCKHCKGKQ
IKYDFQKPSKIPFIEIGGFPSLIHLKKRRFQCKSCRKVTVAETTLVQKNC
QISEMVRQKIAQLLLNREALTHIASKLAISTSTSTVYRKLKQFHFQEDYT
TLPEILSWDEFSYQKGKLAFIAQDFNTKKIMTILDNRRQTTIRNHFFKYS
KEARKKVKVVTVDMSGSYIPLIKKLFPNAKIVLDRFHIVQHMSRALNQTR
INIMKQFDDKSLEYRALKYYWKFILKDSRKLSLKPFYARTFRETLTPREC
LKKIFTLVPELKDYYDLYQLLLFHLQEKNTDQFWGLIQDTLPHLNRTFKT
TLSTFICYKNYITNAIELPYSNAKLEATNKLIKDIKRNAFGFRNFENFKK
RIFIALNIKKERTKFVLSRA

[1213] Orf2_{—}670 is a transcriptional regulator. An example of an amino acid sequence of Orf2_{—}670 is set forth in SEQ ID NO:172.

SEQ ID NO: 172

MLNKYIEKRITDKITILNILLDIRSIELDELSTLTSLQSKSLLSILQELQ
ETFEEELTFNLDTQQVQLIEHHSHQTNYYFHQLYNQSTILKILRFFLLQG
NQSFNEFTQKEYISIATGYRVRQKCGLLLRSVGLDLVKNQVVGPEYRIRF
LIALLQFHFGIEIYDLNDGSMDWVTHMIVQSNSQLSHELLEITPDEYVHF
SILVALTWKRREFPLEFPESKEFEKLKNLFMYPILMEHCQTYLEPHANMT
FTQEELDYIFLVYCSANSSFSKDKWNQEKKTHTIQLILQHTRGKHLLSKF
KNILGNDISNSLSFLTALTFLTRTFLFGLQNLVPYYNYYEHYGIESDKPL
YHISKAIVQEWMTEQKIEGVIDQHRLYLFSLYLTETIFSSLPAIPIFIIL
NNQADVNLIKSIILRNFTDKVASVTGYNILTSPPPSEEHLTEPLIIITTK
EYLPYVKKOYPKGKHHFLTIALDLHVSOORLIYQTIVDIRKEAFDKRVAM
IAKKAHYLL

[1214] Orf3_{—}670 is a cell wall surface anchor family proten. An example of an amino acid sequence of Orf3_{—}670 is set forth in SEQ ID NO:173.

SEQ ID NO: 173

MLNRETHMKKVRKIFQKAVAGLCCISQLTAFSSIVALAETPETSPAIGKV
VIKETGEGGALLGDAVFELKNNTDGTTVSQRTEAQTGEAIFSNIKPGTYT
LTEAQPPVGYKPSTKQWTVEVEKNGRTTVQGEQVENREEALSDQYPQTGT
YPDVQTPYQIIKVDGSEKNGQHKALNPNPYERVIPEGTLSKRIYQVNNLD
DNQYGIELTVSGKTTVETKEASTPLDVVILLDNSNSMSNIRHNHAHRAEK
AGEATRALVDKITSNPDNRVALVTYGSTIFDGSEATVEKGVADANGKILN
DSALWTFDRTTFTAKTYNYSFLNLTSDPTDIQTIKDRIPSDAEELNKDKL
MYQFGATFTQKALMTADDILTKQARPNSKKVIFHITDGVPTMSYPINFKY
TGTTQSYRTQLNNFKAKTPNSSGILLEDFVTWSADGEHKIVRGDGESYQM
FTKKPVTDQYGVHQILSITSMEQRAKLVSAGYRFYGTDLYLYWRDSILAY
PFNSSTDWITNHGDPTTWYYNGNMAQDGYDVFTVGVGVNGDPGTDEATAT
RFMQSISSSPDNYTNVADPSQILQELNRYFYTIVNEKKSIENGTITDPMG
ELIDFQLGADGRFDPADYTLTANDGSSLVNNVPTGGPQNDGGLLKNAKVF
YDTTEKRIRVTGLYLGTGEKVTLTYNVRLNDQFVSNKFYDTNGRTTLHPK
EVEKNTVRDFPIPKIRDVRKYPEITIPKEKKLGEIEFIKINKNDKKPLRD
AVFSLQKQHPDYPDIYGAIDQNGTYQNVRTGEDGKLTFKNLSDGKYRLFE
NSEPAGYKPVQNKPIVAFQIVNGEVRDVTSIVPQDIPAGYEFTNDKHYIT
NEPIPPKREYPRTGGIGMLPFYLIGCMMMGGVLLYTRKHP

[1215] Orf4_{—}670 is a cell wall surface anchor family protein. An example of an amino acid sequence of orf4_{—}670 is set forth in SEQ ID NO:174.

SEQ ID NO: 174

MKSINKFLTMLAALLLTASSLFSAATVFAADNVSTAPDAVTKTLTIHKLL
LSEDDLKTWDTNGPKGYDGTQSSLKDLTGVVAEEIPNVYFELQKYNLTDG
KEKENLKDDSKWTTVHGGLTTKDGLKIETSTLKGVYRIREDRTKTTYVGP
NGQVLTGSKAVPALVTLPLVNNNGTVIDAHVFPKNSYNKPVVDKRIADTL
NYNDQNGLSIGTKIPYVVNTTIPSNATFATSFWSDEMTEGLTYNEDVTIT
LNNVAMDQADYEVTKGNNGFNLKLTEAGLAKINGKDADQKIQITYSATLN
SLAVADIPESNDITYHYGNHQDHGNTPKPTKPNNGQITVTKTWDSQPAPE
GVKATVQLVNAKTGEKVGAPVELSENNWTYTWSGLDNSIEYKVEEEYNGY
SAEYTVESKGKLGVKNWKDNNPAPINPEEPRVKTYGKKFVKVDQKDTRLE
NAQFVVKKADSNKYIAFKSTAQQAADEKAAATAKQKLDAAVAAYTNAADK
QAAQALVDQAQQEYNVAYKEAKFGYVEVAGKDEAMVLTSNTDGQFQISGL
AAGTYKLEEIKAPEGFAKIDDVEFVVGAGSWNQGEFNYLKDVQKNDATKV
VNKKITIPQTGGIGTIIFAVAGAAIMGIAVYAYVKNNKDEDQLA

[1216] Orf5_{—}670 is a cell wall surface anchor family protein. An example of an amino acid sequence of orf5_{—}670 is set forth in SEQ ID NO:175.

SEQ ID NO: 175

MTMQKMQKMISRIFFVMALCFSLVWGAHAVQAQEDHTLVLQLENYQEVVS
QLPSRDGHRLQVWKLDDSYSYDDRVQIVRDLHSWDENKLSSFKKTSFEMT
FLENQIEVSHIPNGLYYVRSIIQTDAVSYPAEFLFEMTDQTVEPLVIVAK
KTDTMTTKVKLIKVDQDHNRLEGVGFKLVSVARDGSEKEVPLIGEYRYSS
SGQVGRTLYTDKNGETFVTNLPLGNYRFKEVEPLAGYAVTTLDTDVQLVD
HQLVTITVVNQKLPRGNVDFMKVDGRTNTSLQGANFKVMKEESGHYTPVL
QNGKEVVVTSGKDGRFRVEGLEYGTYYLWELQAPTGYVQLTSPVSFTIGK
DTRKELVTVVKNNKRPRIDVPDTGEETLYILMLVAILLFGSGYYLTKKPN
N

[1217] Orf6_{—}670 is a sortase. An example of an amino acid sequence of orf6_{—}670 is set forth in SEQ ID NO:176.

SEQ ID NO: 176

MLIKMVKTKKQKRNNLLLGVVFFIGMAVMAYPLVSRLYYRVESNQQIADF
DKEKATLDEADIDERMKLAQAFNDSLNNVVSGDPWSEEMKKKGPAEYARM
LEIHERMGHVEIPVIDVDLPVYAGTAEEVLQQGAGHLEGTSLPIGGNSTH
AVITAHTGLPTAKMFTDLTKLKVGDKFYVHNIKEVMAYQVDQVKVIEPTN
FDDLLIVPGHDYVTLLTCTPYMINTHRLLVRGHRIPYVAEVEEEFIAANK
LSHLYRYLFYVAVGLIVILLWIIRRLRKKKKQPEKALKALKAARKEVKVE
DGQQ

[1218] Orf7_{—}670 is a sortase. An example of an amino acid sequence of orf7_{—}670 is set forth in SEQ ID NO:177.

SEQ ID NO: 177

VSRYYYRIESNEVIKEFDETVSQMDKAELEERWRLAQAFNATLKPSEILD
PFTEQEKKKGVSEYANMLKVHERIGYVEIPAIDQEIPMYVGTSEEILQKG
AGLLEGASLPVGGENTHTVVTAHRGLPTAELFSQLDKMKKGDVFYLHVLD
QVLAYQVDQILTVEPNDFEPVLIQHGEDYATLLTCTPYMINSHRLLVRGK
RIPYTAPIAERNRAVRERGQFWLWLLLAALVMILVLSYGVYRHRRIVKGL
EKQLEEHHVKG

[1219] Orf8_{—}670 is a sortase. An example of an amino acid sequence of orf8_{—}670 is set forth in SEQ ID NO:178.

SEQ ID NO: 178

MSKAKLQKLLGYLLMLVALVIPVYCFGQMVLQSLGQVKGHEIFSESVTAD
SYQEQLQRSLDYNQRLDSQNRIVDPFLAEGYEVNYQVSDDPDAVYGYLSI
PSLEIMEPVYLGADYHHLAHGLAHVDGTPLPVEGKGIRSVIAGHRAEPSH
VFFRHLDQLKVGDALYYDNGQEIVEYQMMDTEIILPSEWEKLESVSSKNI
MTLITCDPIPTFNKRLLVNFERVAVYQKSDPQTAAVARVAFTKEGQSVSR
VATSQWLYRGLVVLAFLGILFVLWKLARLLRGK

[1220] As discussed above, a S. pneumoniae AI sequence is present in the 19A Hungary 6 S. pneumoniae genome. Examples of S. pneumoniae AI sequences from 19A Hungary 6 are set forth below.

[1221] ORF2_{—}19AH is a transcriptional regulator. An example of an amino acid sequence of ORF2_{—}19AH is set forth in SEQ ID NO:187.

SEQ ID NO: 187

MLNKYIEKRITDKITILNILLDIRSIELDELSTLTSLQSKSLLSILQELQ
ETFEEELTFNLDTQQVQLIEHHSHQTNYYFHQLYNQSTILKILRFFLLQG
NQSFNEFTQKEYISIATGYRVRQKCGLLLRSVGLDLVKNQVVGPEYRIRF
LIALLQFHFGIEIYDLNDGSMDWVTHMIVQSNSQLSHELLEITPDEYVHF
SILVALTWKRREFPLEFPESKEFEKLKNLFMYPILMEHCQTYLEPHANMT
FTQEELDYIFLVYCSANSSFSKDKWNQEKKTHTIQLILQHTRGKHLLSKF
KNILGNDISNSLSFLTALTFLTRTFLFGLQNLVPYYNYYEHYGIESDKPL
YHISKAIVQEWMTEQKIEGVIDQHRLYLFSLYLTETIFSSLPAIPIFIIL
NNQADVNLIKSIILRNFTDKVASVTGYNILISPPPSEEHLTEPLIIITTK
EYLPYVKKQYPKGKHHFLTIALDLHVSQQRLIYOTIVDIRKEAFDKRVAM
IAKKAHYLL

[1222] ORF3_{—}19AH is a cell wall surface protein. An example of an amino acid sequence of ORF3_{—}19AH is set forth in SEQ ID NO:188.

SEQ ID NO: 188

MKKVRKIFQKAVAGLCCISQLTAFSSIVALAETPETSPAIGKVVIKETGE
GGALLGDAVFELKNNTDGTTVSQRTEAQTGEAIFSNIKPGTYTLTEAQPP
VGYKPSTKQWTVEVEKNGRTTVQGEQVENREEALSDQYPQTGTYPDVQTP
YQIIKVDGSEKNGQHKALNPNPYERVIPEGTLSKRIYQVNNLDDNQYGIE
LTVSGKTTVETKEASTPLDVVILLDNSNSMSNIRHNHAHRAEKAGEATRA
LVDKITSNPDNRVALVTYGSTIFDGSEATVEKGVADANGKILNDSALWTF
DRTTFTAKTYNYSFLNLTSDPTDIQTIKDRIPSDAEELNKDKLMYQFGAT
FTQKALMTADDILTKQARPNSKKVIFHITDGVPTMSYPINFKYTGTTQSY
RTQLNNFKAKTPNSSGILLEDFVTWSADGEHKIVRGDGESYQMFTKKPVT
DQYGVHQILSITSMEQRAKLVSAGYRFYGTDLYLYWRDSILAYPFNSSTD
WITNHGDPTTWYYNGNMAQDGYDVFTVGVGVNGDPGTDEATATRFMQSIS
SSPDNYTNVADPSQILQELNRYFYTIVNEKKSIENGTITDPMGELIDFQL
GADGRFDPADYTLTANDGSSLVNNVPTGGPQNDGGLLKNAKVFYDTTEKR
IRVTGLYLGTGEKVTLTYNVRLNDQFVSNKFYDTNGRTTLHPKEVEKNTV
RDFPIPKIRDVRKYPEITIPKEKKLGEIEFIKINKNDKKPLRDAVFSLQK
QHPDYPDIYGAIDQNGTYQNVRTGEDGKLTFKNLSDGKYRLFENSEPAGY
KPVQNKPIVAFQIVNGEVRDVTSIVPQDIPAGYEFTNDKHYITNEPIPPK
REYPRTGGIGMLPFYLIGCMMMGGVLLYTRKNP

[1223] ORF4_{—}19AH is a cell wall surface protein. An example of an amino acid sequence of ORF4_{—}19AH is set forth in SEQ ID NO:189.

SEQ ID NO: 189

MKSINKFLTMLAALLLTASSLFSAATVFAADNVSTAPDAVTKTLTIHKLL
LSEDDLKTWDTNGPKGYDGTQSSLKDLTGVVAEEIPNVYFELQKYNLTDG
KEKENLKDDSKWTTVHGGLTTKDGLKIETSTLKGVYRIREDRTKTTYVGP
NGQVLTGSKAVPALVTLPLVNNNGTVIDAHVFPKNSYNKPVVDKRIADTL
NYNDQNGLSIGTKIPYVVNTTIPSNATFATSFWSDEMTEGLTYNEDVTIT
LNNVAMDQADYEVTKGXNGFNLKLTEAGLAKINGKDADQKIQITYSATLN
SLAVADIPESNDITYHYGNHQDHGNTPKPTKPNNGQITVTKTWDSQPAPE
GVKATVQLVNAKTGEKVGAPVELSENNWTYTWSGLDNSIEYKVEEEYNGY
SAEYTVESKGKLGVKNWKDNNPAPINPEEPRVKTYGKKFVKVDQKDTRLE
NAQFVVKKADSNKYIAFKSTAQQAADEKAAATAKQKLDAAVAAYTNAADK
QAAQALVDQAQQEYNVAYKEAKFGYVEVAGKDEAMVLTSNTDGQFQISGL
AAGTYKLEEIKAPEGFAKIDDVEFVVGAGSWNQGEFNYLKDVQKNDATKV
VNKKITIPQTGGIGTIIFAVAGAAIMGIAVYAYVKNNKDEDQLA

[1224] ORF5_{—}19AH is a cell wall surface protein. An example of an amino acid sequence of ORF5_{—}19AH is set forth in SEQ ID NO:190.

SEQ ID NO: 190

MTMQKMQKMISRIFFVMALCFSLVWGAHAVQAQEDHTLVLQLENYQEVVS
QLPSRDGHRLQVWKLDDSYSYDDRVQIVRDLHSWDENKLSSFKKTSFEMT
FLENQIEVSHIPNGLYYVRSIIQTDAVSYPAEFLFEMTDQTVEPLVIVAK
KTDTMTTKVKLIKVDQDHNRLEGVGFKLVSVARDGSEKEVPLIGEYRYSS
SGQVGRTLYTDKNGEIFVTNLPLGNYRFKEVEPLAGYAVTTLDTDVQLVD
HQLVTITVVNQKLPRGNVDFMKVDGRTNTSLQGAMFKVMKEESGHYTPVL
QNGKEVVVTSGKDGRFRVEGLEYGTYYLWELQAPTGYVQLTSPVSFTIGK
DTRKELVTVVKNNKRPRIDVPDTGEETLYILMLVAILLFGSGYYLTKKPN
N

[1225] ORF6_{—}19AH is a putative sortase. An example of an amino acid sequence of ORF6_{—}19AH is set forth in SEQ ID NO:191.

SEQ ID NO: 191

MLIKMVKTKKQKRNNLLLGVVFFIGMAVMAYPLVSRLYYRVESNQQIADF
DKEKATLDEADIDERMKLAQAFNDSLNNVVSGDPWSEEMKKKGRAEYARM
LEIHERMGHVEIPVIDVDLPVYAGTAEEVLQQGAGHLEGTSLPIGGNSTH
AVITAHTGLPTAKMFTDLTKLKVGDKFYVHNIKEVMAYQVDQVKVIEPTN
FDDLLIVPGHDYVTLLTCTPYMINTHRLLVRGHRIPYVAEVEEEFIAANK
LSHLYRYLFYVAVGLIVILLWIIRRLRKKKKQPEKALKALKAARKEVKVE
DGQQ

[1226] ORF7_{—}19AH is a putative sortase. An example of an amino acid sequence of ORF7_{—}19AH is set forth in SEQ ID NO:192.

SEQ ID NO: 192

MDNSRRSRKKGTKKKKHPLILLLIFLVGFAVAIYPLVSRYYYRIESNEVI
KEFDETVSQMDKAELEERWRLAQAFNATLKPSEILDPFTEQEKKKGVSEY
ANMLKVHERIGYVEIPAIDQEIPMYVGTSEEILQKGAGLLEGASLPVGGE
NTHTVVTAHRGLPTAELFSQLDKMKKGDVFYLHVLDQVLAYQVDQILTVE
PNDFEPVLIQHGEDYATLLTCTPYMINSHRLLVRGKRIPYTAPIAERNRA
VRERGQFWLWLLLAALVMILVLSYGVYRHRRIVKGLEKQLEEHHVK

[1227] ORF8_{—}19AH is a putative sortase. An example of an amino acid sequence of ORF8_{—}19AH is set forth in SEQ ID NO:193.

SEQ ID NO: 193

MSKAKLQKLLGYLLMLVALVIPVYCFGQMVLQSLGQVKGHEIFSESVTAD
SYQEQLQRSLDYNQRLDSQNRIVDPFLAEGYEVNYQVSDDPDAVYGYLSI
PSLEIMEPVYLGADYHHLAMGLAHVDGTPLPVEGKGIRSVIAGHRAEPSH
VFFRHLDQLKVGDALYYDNGQEIVEYQMMDTEIILPSEWEKLESVSSKNI
MTLITCDPIPTFNKRLLVNFERVAVYQKSDPQTAAVARVAFTKEGQSVSR
VATSQWLYRGLVVLAFMGILFVLWKLARLLRGK

[1228] As discussed above, a S. pneumoniae AI sequence is present in the 6B Finland 12 S. pneumoniae genome. Examples of S. pneumoniae AI sequences from 6B Finland 12 are set forth below.

[1229] ORF2_{—}6BF is a transcriptional regulator. An example of an amino acid sequence of ORF2_{—}6BF is set forth in SEQ ID NO:194.

SEQ ID NO: 194

MLNKYIEKRITDKITILNILLDIRSIELDELSTLTSLQSKSLLSILQELQ
ETFEEELTFNLDTQQVQLIEHHSHQTNYYFHQLYNQSTILKILRFFLLQG
NQSFNEFTQKEYISIATGYRVRQKCGLLLRSVGLDLVKNQVVGPEYRIRF
LIALLQFHFGIEIYDLNDGSMDWVTHMIVQSNSQLSHELLEITPDEYVHF
SILVALTWKRREFPLEFPESKEFEKLKNLFMYPILMEHCQTYLEPHANMT
FTQEELDYIFLVYCSANSSFSKDKWNQEKKTHTIQLILQHTRGKHLLSKF
KNILGNDISNSLSFLTALTFLTRTFLFGLQNLVPYYNYYEHYGIESDKPL
YHISKAIVQEWMTEQKIEGVIDQHRLYLFSLYLTETIFSSLPAIPIFIIL
NNQADVNLIKSIILRNFTDKVASVTGYNILISPPPSEEHLTEPLIIITTK
EYLPYVKKQYPKGKHHFLTIALDLHVSQQRLIYQTIVDIRKEAFDKRVAM
IAKKAHYLL

[1230] ORF3_{—}6BF is a cell wall surface protein. An example of an amino acid sequence of ORF3_{—}6BF is set forth in SEQ ID NO:195.

SEQ ID NO: 195

MKKVRKIFQKAVAGLCCISQLTAFSSIVALAETPETSPAIGKVVIKETGE
GGALLGDAVFELKNNTDGTTVSQRTEAQTGEAIFSNIKPGTYTLTEAQPP
VGYKPSTKQWTVEVEKNGRTTVQGEQVENREEALSDQYPQTGTYPDVQTP
YQIIKVDGSEKNGQHKALNPNPYERVIPEGTLSKRIYQVNNLDDNQYGIE
LTVSGKTTVETKEASTPLDVVILLDNSNSMSNIRHNHAHRAEKAGEATRA
LVDKITSNPDNRVALVTYGSTIFDGSEATVEKGVADANGKILNDSALWTF
DRTTFTAKTYNYSFLNLTSDPTDIQTIKDRIPSDAEELNKDKLMYQFGAT
FTQKALMTADDILTKQARPNSKKVIFHITDGVPTMSYPINFKYTGTTQSY
RTQLNNFKAKTPNSSGILLEDFVTWSADGEHKIVRGDGESYQMFTKKPVT
DQYGVHQILSITSMEQRAKLVSAGYRFYGTDLYLYWRDSILAYPFNSSTD
WITNHGDPTTWYYNGNMAQDGYDVFTVGVGVNGDPGTDEATATRFMQSIS
SSPDNYTNVADPSQILQELNRYFYTIVNEKKSIENGTITDPMGELIDFQL
GADGRFDPADYTLTANDGSSLVNNVPTGGPQNDGGLLKNAKVFYDTTEKR
IRVTGLYLGTGEKVTLTYNVRLNDQFVSNKFYDTNGRTTLHPKEVEKNTV
RDFPIPKIRDVRKYPEITIPKEKKLGEIEFIKINKNDKKPLRDAVFSLQK
QHPDYPDIYGAIDQNGTYQNVRTGEDGKLTFKNLSDGKYRLFENSEPAGY
KPVQNKPIVAFQIVNGEVRDVTSIVPQDIPAGYEFTNDKHYITNEPIPPK
REYPRTGGIGMLPFYLIGCMMMGGVLLYTRKHP

[1231] ORF4_{—}6BF is a cell wall surface protein. An example of an amino acid sequence of ORF4_{—}6BF is set forth in SEQ ID NO:196.

SEQ ID NO: 196

MKSINKFLTMLAALLLTASSLFSAATVFAADNVSTAPDAVTKTLTIHKLL
LSEDDLKTWDTNGPKGYDGTQSSLKDLTGVVAEEIPNVYFELQKYNLTDG
KEKENLKDDSKWTTVHGGLTTKDGLKIETSTLKGVYRIREDRTKTTYVGP
NGQVLTGSKAVPALVTLPLVNNNGTVIDAHVFPKNSYNKPVVDKRIADTL
NYNDQNGLSIGTKIPYVVNTTIPSNATFATSFWSDEMTEGLTYNEDVTIT
LNNVAMDQADYEVTKGNNGFNLKLTEAGLAKINGKDADQKIQITYSATLN
SLAVADIPESNDITYHYGNHQDHGNTPKPTKPNNGQITVTKTWDSQPAPE
GVKATVQLVNAKTGEKVGAPVELSENNWTYTWSGLDNSIEYKVEEEYNGY
SAEYTVESKGKLGVKNWKDNNPAPINPEEPRVKTYGKKFVKVDQKDTRLE
NAQFVVKKADSNKYIAFKSTAQQAADEKAAATAKQKLDAAVAAYTNAADK
QAAQALVDQAQQEYNVAYKEAKFGYVEVAGKDEAMVLTSNTDGQFQISGL
AAGTYKLEEIKAPEGFAKIDDVEFVVGAGSWNQGEFNYLKDVQKNDATKV
VNKKITIPQTGGIGTIIFAVAGAAIMGIAVYAYVKNNKDEDQLA

[1232] ORF5_{—}6BF is a cell wall surface protein. An example of an amino acid sequence of ORF5_{—}6BF is set forth in SEQ ID NO:197.

SEQ ID NO: 197

MTMQKMQKMISRIFFVMALCFSLVWGAHAVQAQEDHTLVLQLENYQEVVS
QLPSRDGHRLQVWKLDDSYSYDDRVQIVRDLHSWDENKLSSFKKTSFEMT
FLENQIEVSHIPNGLYYVRSIIQTDAVSYPAEFLFEMTDQTVEPLVIVAK
KTDTMTTKVKLIKVDQDHNRLEGVGFKLVSVARDGSEKEVPLIGEYRYSS
SGQVGRTLYTDKNGEIFVTNLPLGNYRFKEVEPLAGYAVTTLDTDVQLVD
HQLVTITVVNQKLPRGNVDFMKVDGRTNTSLQGAMFKVMKEESGHYTPVL
QNGKEVVVTSGKDGRFRVEGLEYGTYYLWELQAPTGYVQLTSPVSFTIGK
DTRKELVTVVKNNKRPRIDVPDTGEETLYILMLVAILLFGSGYYLTKKPN
N

[1233] ORF6_{—}6BF is a putative sortase. An example of an amino acid sequence of ORF6_{—}6BF is set forth in SEQ ID NO:198.

SEQ ID NO: 198

MLIKMVKTKKQKRNNLLLGVVFFIGMAVMAYPLVSRLYYRVESNQQIADF
DKEKATLDEADIDERMKLAQAFNDSLNNVVSGDPWSEEMKKKGRAEYARM
LEIHERMGHVEIPVIDVDLPVYAGTAEEVLQQGAGHLEGTSLPIGGNSTH
AVITAHTGLPTAKMFTDLTKLKVGDKFYVHNIKEVMAYQVDQVKVIEPTN
FDDLLIVPGHDYVTLLTCTPYMINTHRLLVRGHRIPYVAEVEEEFIAANK
LSHLYRYLFYVAVGLIVTLLWIIRRLRKKKKQPEKALKALKAARKEVKVE
DGQQ

[1234] ORF7_{—}6BF is a putative sortase. An example of an amino acid sequence of ORF7_{—}6BF is set forth in SEQ ID NO:199.

SEQ ID NO: 199

MDNSRRSKKGTKKKKKHPLILLLIFLVGFAVAIYPLVSRYYYRIESNEVI
KEFDETVSQMDKAELEERWRLAQAFNATLKPSEILDPFTEQEKKKGVSEY
ANMLKVHERIGYVEIPAIDQEIPMYVGTSEEILQKGAGLLEGASLPVGGE
NTHTVVTAHRGLPTAELFSQLDKMKKGDVFYLHVLDQVLAYQVDQILTVE
PNDFEPVLIQHGEDYATLLTCTPYMINSHRLLVRGKRIPYTAPIAERNRA
VRERGQFWLWLLLAALVMILVLSYGVYRHRRIVKGLEKQLEEHHVKG

[1235] ORF8_{—}6BF is a putative sortase. An example of an amino acid sequence of ORF8_{—}6BF is set forth in SEQ ID NO:200.

SEQ ID NO: 200

MSKAKLQKLLGYLLMLVALVIPVYCFGQMVLQSLGQVKGHEIFSESVTAD
SYQEQLQRSLDYNQRLDSQNRIVDPFLAEGYEVNYQVSDDPDAVYGYLSI
PSLEIMEPVYLGADYHHLAMGLAHVDGTPLPVEGKGIRSVIAGHRAEPSH
VFFRHLDQLKVGDALYYDNGQEIVEYQMMDTEIILPSEWEKLESVSSKNI
MTLITCDPIPTFNKRLLVNFERVAVYQKSDPQTAAVARVAFTKEGQSVSR
VATSQWLYRGLVVLAFLGILFVLWKLARLLRGK

[1236] As discussed above, a S. pneumoniae AI sequence is present in the 6B Spain 2 S. pneumoniae genome. Examples of S. pneumoniae AI sequences from 6B Spain 2 are set forth below.

[1237] ORF2_{—}6BSP is a transcriptional regulator. An example of an amino acid sequence of ORF2_{—}6BSP is set forth in SEQ ID NO:201.

SEQ ID NO: 201

MLNKYIEKRITDKITILNILLDIRSIELDELSTLTSLQSKSLLSILQELQ
ETFEEELTFNLDTQQVQLIEHHSHQTNYYFQHLYNQSTILKILRFFLLQG
NQSFNEFTQKEYISIATGYRVRQKCGLLLRSVGLDLVKNQVVGPEYRIRF
LIALLQFHFGIEIYDLNDGSMDWVTHMIVQSNSQLSHELLEITPDYRVHF
SILVALTWKRREFPLEFPESKEFEKLKNLFMYPILMEHCQTYLEPHANMT
FTQEELDYIFLVYCSANSSFSKDKWNQEKKTHTIQLILQHTRGHKLLSKF
KNILGNDISNSLSFLTALTFLTRTFLFGLQNLVPYYNYYEHYGIESDKPL
YHISKAIVQEWMTEQKIEGVIDQHRLYLFSLYLTETIFSSLPAIPIFIIL
NNQADVNLIKSIILRNFTDKVASVTGYNILISPPPSEEHLTEPLIIITTK
EYLPYVKKQYPKGKHHFLTIALDLHVSQQRLIYQTIVDIRKEAFDKRVAM
IAKKAHYLL

[1238] ORF3_{—}6BSP is a cell wall surface protein. An example of an amino acid sequence of ORF3_{—}6BSP is set forth in SEQ ID NO:202.

SEQ ID NO: 202

MKKVRKIFQKAVAGLCCISQLTAFSSIVALAETPETSPAIGKVVIKETGE
GGALLGDAVFELKNNTDGTTVSQRTEAQTGEAIFSNIKPGTYTLTEAQPP
VGYKPSTKQWTVEVEKNGRTTVQGEQVENREEALSDQYPQTGTYPDVQTP
YQIIKVDGSEKNGQHKALNPNPYERVIPEGTLSKRIYQVNNLDDNQYGIE
LTVSGKTTVETKEASTPLDVVILLDNSNSMSNIRHNHAHRAEKAGEATRA
LVDKITSNPDNRVALVTYGSTIFDGSEATVEKGVADANGKILNDSALWTF
DRTTFTAKTYNYSFLNLTSDPTDIQTIKDRIPSDAEELNKDKLMYQFGAT
FTQKALMTADDILTKQARPNSKKVIFHITDGVPTMSYPINFKYTFTTQSY
RTQLNNFKAKTPNSSGILLEDFVTWSADGEHKIVRGDGESYQMFTKKPVT
DQYGVHQILSITSMEQRAKLVSAGYRFYGTDLYLYWRDSILAYPFNSSTD
WITNHGDPTTWYYNGNMAQDGYDVFTVGVGVNGDPGTDEATATRFMQSIS
SSPDNYTNVADPSQILEALNRYFYTIVNEKKSIENGTITDPMGELIDFQL
GADGRFDPADYTLTANDGSSLVNNVPTGGPQNDGGLLKNAKVFYDTTEKR
IRVTGLYLGTGEKVTLTYNVRLNDQFVSNKFYDTNGRTTLHPKEVEKNTV
RDFPIPKIRDVRKYPEITIPKEKKLGEIEFIKINKNDKKPLRDAVFSLQK
QHPDYPDIYGAIDQNGTYQNVRTGEDGKLTFKNLSDGKYRLFENSEPAGY
KPVQNKPIVAFQIVNGEVRDVTSIVQPDIPAGYEFTNDKHYITNEPIPPK
REYPRTGGIGMLPFYLIGCMMMGGVLLYTRKHP

[1239] ORF4_{—}6BSP is a cell wall surface protein. An example of an amino acid sequence of ORF4_{—}6BSP is set forth in SEQ ID NO:203.

SEQ ID NO: 203

MKSINKFLTMLAALLLTASSLFSAATVFAADNVSTAPDAVTKTLTIHKLL
LSEDDLKTWDTNGPKGYDGTQSSLKDLTGVVAEEIPNVYFELQKYNLTDG
KEKENLKDDSKWTTVHGGLTTKDGLKIETSTLKGVYRIREDRTKTTYVGP
NGQVLTGSKAVPALVTLPLVNNNGTVIDAHVFPKNSYNKPVVDKRIADTL
NYNDQNGLSIGTKIPYVVNTTIPSNATFATSFWSDEMTEGLTYNEDVTIT
LNNVAMDQADYEVTKGNNGFNLKLTEAGLAKINGKDADQKIQITYSATLN
SLAVADIPESNDITYHYGNHQDHGNTPKPTKPNNGQITVTKTWDSQPAPE
GVKATVQLVNAKTGEKVGAPVELSENNWTYTWSGLDNSIEYKVEEEYNGY
SAEYTVESKGKLGVKNWKDNNPAPINPEEPRVKTYGKKFVKVDQKDTRLE
NAQFVVKKADSNKYIAFKSTAQQAADEKAAATAKQKLDAAVAAYTNAADK
QAAQALVDQAQQEYNVAYKEAKFGYVEVAGKDEAMVLTSNTDGQFQISGL
AAGTYKLEEIKAPEGFAKIDDVEFVVGAGSWNQGEFNYLKDVQKNDATKV
VNKKITIPQTGGIGTIIFAVAGAAIMGIAVYAYVKNNKDEDQLA

[1240] ORF5_{—}6BSP is a cell wall surface protein. An example of an amino acid sequence of ORF5_{—}6BSP is set forth in SEQ ID NO:204.

SEQ ID NO: 204

MTMQKMQKMISRIFFVMALCFSLVWGAHAVQAQEDHTLVLQLENYQEVVS
QLPSRDGHRLQVWKLDDSYSYDDRVQIVRDLHSWDENKLSSFKKTSFEMT
FLENQIEVSHIPNGLYYVRSIIQTDAVSYPAEFLFEMTDQTVEPLVIVAK
KTDTMTTKVKLIKVDQDHNRLEGVGFKLVSVARDGSEKEVPLIGEYRYSS
SGQVGRTLYTDKNGEIFVTNLPLGNYRFKEVEPLAGYAVTTLDTDVQLVD
HQLVTITVVNQKLPRGNVDFMKVDGRTNTSLQGAMFKVMKEESGHYTPVL
QNGKEVVVTSGKDGRFRVEGLEYGTYYLWELQAPTGYVQLTSPVSFTIGK
DTRKELVTVVKNNKRPRIDVPDTGEETLYILMLVAILLFGSGYYLTKKPN
N

[1241] ORF6_{—}6BSP is a putative sortase. An example of an amino acid sequence of ORF6_{—}6BSP is set forth in SEQ ID NO:205.

SEQ ID NO: 205

MLIKMVKTKKQKRNNLLLGVVFFIGMAVMAYPLVSRLYYRVESNQQIADF
DKEKATLDEADIDERMKLAQAFNDSLNNVVSGDPWSEEMKKKGRAEYARM
LEIHERMGHVEIPVIDVDLPVYAGTAEEVLQQGAGHLEGTSLPIGGNSTH
AVITAHTGLPTAKMFTDLTKLKVGDKFYVHNIKEVMAYQVDQVKVIEPTN
FDDLLIVPGHDYVTLLTCTPYMINTHRLLVRGHRIPYVAEVEEEFIAANK
LSHLYRYLFYVAVGLIVILLWIIRRLRKKKKQPEKALKALKAARKEVKVE
DGQQ

[1242] ORF7_{—}6BSP is a putative sortase. An example of an amino acid sequence of ORF7_{—}6BSP is set forth in SEQ ID NO:206.

SEQ ID NO: 206

MDNSRRSRKKGTKKKKHPLILLLIFLVGFAVAIYPLVSRYYYRIESNEVI
KEFDETVSQMDKAELEERWRLAQAFNATLKPSEILDPFTEQEKKKGVSEY
ANMLKVHERIGYVEIPAIDQEIPMYVGTSEEILQKGAGLLEGASLPVGGE
NTHTVVTAHRGLPTAELFSQLDKMKKGDVFYLHVLDQVLAYQVDQILTVE
PNDFEPVLIQHGEDYATLLTCTPYMINSHRLLVRGKRIPYTAPIAERNRA
VRERGQFWLWLLLAALVMILVLSYGVYRHRRIVKGLEKQLEEHHVKG

[1243] ORF8_{—}6BSP is a putative sortase. An example of an amino acid sequence of ORF8_{—}6BSP is set forth in SEQ ID NO:207.

SEQ ID NO: 207

MSKAKLQKLLGYLLMLVALVIPVYCFGQMVLQSLGQVKGHEIFSESVTAD
SYQEQLQRSLDYNQRLDSQNRIVDPFLAEGYEVNYQVSDDPDAVYGYLSI
PSLEIMEPVYLGADYHHLAMGLAHVDGTPLPVEGKGIRSVIAGHRAEPSH
VFFRHLDQLKVGDALYYDNGQEIVEYQMMDTEIILPSEWEKLESVSSKNI
MTLITCDPIPTFNKRLLVNFERVAVYQKSDPQTAAVARVAFTKEGQSVSR
VATSQWLYRGLVVLAFLGILFVLWKLARLLRGK

[1244] As discussed above, a S. pneumoniae AI sequence is present in the 9V Spain 3 S. pneumoniae genome. Examples of S. pneumoniae AI sequences from 9V Spain 3 are set forth below.

[1245] ORF2_{—}9VSP is a transcriptional regulator. An example of an amino acid sequence of ORF2_{—}9VSP is set forth in SEQ ID NO:208.

SEQ ID NO: 208

MLNKYIEKRITDKITILNILLDIRSIELDELSTLTSLQSKSLLSILQELQ
ETFEEELTFNLDTQQVQLIEHHSHQTNYYFHQLYNQSTILKILRFFLLQG
NQSFNEFTQKEYISIATGYRVRQKCGLLLRSVGLDLVKNQVVGPEYRIRF
LIALLQFHFGIEIYDLNDGSMDWVTHMIVQSNSQLSHELLEITPDEYVHF
SILVALTWKRREFPLEFPESKEFEKLKNLFMYPILMEHCQTYLEPHANMT
FTQEELDYIFLVYCSANSSFSKDKWNQEKKTHTIQLILQHTRGKHLLSKF
KNILGNDISNSLSFLTALTFLTRTFLFGLQNLVPYYNYYEHYGIESDKPL
YHISKAIVQEWMTEQKIEGVIDQHRLYLFSLYLTETIFSSLPAIPIFIIL
NNQADVNLIKSIILRNFTDKVASVTGYNILISPPPSEEHLTEPLIIITTK
EYLPYVKKQYPKGKHHFLTIALDLHVSQQRLIYQTIVDIRKEAFDKRVAM
IAKKAHYLL

[1246] ORF3_{—}9VSP is a cell wall surface protein. An example of an amino acid sequence of ORF3_{—}9VSP is set forth in SEQ ID NO:209.

SEQ ID NO: 209

MKKVRKIFQKAVAGLCCISQLTAFSSIVALAETPETSPAIGKVVIKETGE
GGALLGDAVFELKNNTNGTTVSQRTEAQTGEAIFSNIKPGTYTLTEAQPP
VGYKPSTKQRTVEVEKNGRTTVQGEQVENREEALSDQYPQTGTYPDVQTP
YQIIKVDGSEKNGQHKALNPNPYERVIPEGTLSKRIYQVNNLDDNQYGIE
LTVSGKTVYERKDKSVPLDVVILLDNSNSMSNIRNKNARRAERAGEATRS
LIDKITSDPENRVALVTYASTIFDGTEFTVEKGVADKNGKRLNDSLFWNY
DQTSFTTNTKDYSYLKLTNDKNDIVELKNKVPTEAEDHDGNRLMYQFGAT
FTQKALMKADEILTQQARQNSQKVIFHITDGVPTMSYPINFNHATFAPSY
QNQLNAFFSKSPNKDGILLSDFITQATSGEHTIVRGDGQSYQMFTDKTVY
EKGAPAAFPVKPEKYSEMKAVGYAVIGDPINGGYIWLNWRESILAYPFNS
NTAKITNHGDPTRWYYNGNIAPDGYDVFTGIGINGDPGTDEATATASFMQ
SISSKPENYTNVTDTTKILEQLNRYFHTIVTEKKSIENGTITDPMGELID
LQLGTDGRFDPADYTLTANDGSRLENGQAVGGPQNDGGLLKNAKVFYDTT
EKRIRVTGLYLGTGEKVTLTYNVRLNDQFVSNKFYDTNGRTTLHPKEVEK
NTVRDFPIPKIRDVRKYPAITIAKEKKLGEIEFIKINKNDKKPLRDAVFS
LQKQHPDYPDIYGAIDQNGTYQNVRTGEDGKLTFKNLSDGKYRLFENSEP
AGYKPVQNKPIVAFQIVNGEVRDVTSIVPQDIPAGYEFTNDKHYITNEPI
PPKREYPRTGGIGMLLFYLIGCMMMGGVLLYTRKHP

[1247] ORF4_{—}9VSP is a cell wall surface protein. An example of an amino acid sequence of ORF4_{—}9VSP is set forth in SEQ ID NO:210.

SEQ ID NO: 210

MKSINKFLTMLAALLLTASSLFSAATVFAAGTTTTSVTVHKLLATDGDMD
KIANELETGNYAGNKVGVLPANAKEIAGVMFVWTNTNNEIIDENGQTLGV
NIDPQTFKLSGAMPATAMKKLTEAEGAKFNTANLPAAKYKIYEIHSLSTY
VGEDGATLTGSKAVPIEIELPLNDVVDAHVYPKNTEAKPKIDKDFKGKAN
PDTPRVDKDTPVNHQVGDVVEYEIVTKIPALANYATANWSDRMTEGLAFN
KGTVKVTVDDVALEAGDYALTEVATGFDLKLTDAGLAKVNDQNAEKTVKI
TYSATLNDKAIVEVPESNDVTFNYGNNPDHGHTPKPNKPNENGDLTLTKT
WVDATGAPIPAGAEATFDLVNAQTGKVVQTVTLTTDKNTVTVNGLDKNTE
YKFVERSIKGYSADYQEITTAGEIAVKNWKDENPKPLDPTEPKVVTYGKK
FVKVNDKDNRLAGAEFVIANADNAGQYLARKADKVSQEEKQLVVTTKDAL
DRAVAAYNALTAQQQTQQEKEKVDKAQAAYNAAVIAANNAFEWVADKDNE
NVVKLVSDAQGRFEITGLLAGTYYLEETKQPAGYALLTSRQKFEVTATSY
SATGQGIEYTAGSGKDDATKVVNKKITIPQTGGIGTIIFAVAGAVIMGIA
VYAYVKNNKDEDQLA

[1248] ORF5_{—}9VSP is a cell wall surface protein. An example of an amino acid sequence of ORF5_{—}9VSP is set forth in SEQ ID NO:211.

SEQ ID NO: 211

MTMQKMQKMQKMQKMQKMQKMISRIFFVMALVFSLVWGAHAVQAQEDHTL
VLQLENYQEVVSQLPSRDGHRLQVWKLDDSYSYDNRVQIVRDLHSWDENK
LSSFKKTSFEMTFLENQIEVSHIPNGLYYVRSIIQTDAVSYPAEFLFEMT
DQTVEPLVIVAKKADTVTTKVKLIKVDQDHNRLEGVGFKLVSVARDGSEK
EVPLIGEYRYSSSGQVGRTLYTDKNGEIVVTNLPLGTYRFKEVEPLAGYT
VTTMDTDVQLVDHQLVTITVVNQKLPRGNVDFMKVDGRTNTSLQGAMFKV
MKEENGHYTPVLQNGKEVVVASGKDGRFRVEGLEYGTYYLWELQAPTGYV
QLTSPVSFTIGKDTRKELVTVVKNNKRPRIDVPDTGEETLIYLMLVAILL
FGSGYYLTKKTNN

[1249] ORF6_{—}9VSP is a putative sortase. An example of an amino acid sequence of ORF6_{—}9VSP is set forth in SEQ ID NO:212.

SEQ ID NO: 212

MLIKMAKTKKQKRNNLLLGVVFFIGIAVMAYPLVSRLYYRVESNQQIADF
DKEKATLDEADIDERMKLAQAFNDSLNNVVSGDPWSEEMKKKGRAEYARM
LEIHERMGHVEIPAIDVDLPVYAGTAEEVLQQGAGHLEGTSLPIGGNSTH
AVITAHTGLPTAKMFTDLTKLKVGDKFYVHNIKEVMAYQVDQVKVIEPTN
FDDLLIVPGHDYVTLLTCTPYMINTHRLLVRGHRIPYVAEVEEEFIAANK
LSHLYRYLFYVAVGLIVILLWIIRRLRKKKRQSERALKALKEATKEVKVE
DE

[1250] ORF7_{—}9VSP is a putative sortase. An example of an amino acid sequence of ORF7_{—}9VSP is set forth in SEQ ID NO:213.

SEQ ID NO: 213

MSKSRYSRKKSVKKKKNPFILLLIFLVGLAVAMYPLVSRYYYRIESNEVI
KEFDETVSQMDKAELEERWRLAQAFNATLKPSEILDPFTEQEKKKGVSEY
ANMLKVHERIGYVEIPAIDQEIPMYVGTSEEILQKGAGLLEGASLPVGGE
NTHTVVTAHRGLPTAELFSQLDKMKKGDIFYLHVLDQVLAYQVDQIVTVE
PNDFEPVLIQHGEDYATLLTCTPYMINSHRLLVRGKRIPYTAPIAERNRA
VRERGQFWLWLLLGAMAVILLLLYRVYRNRRIVKGLEKQLEGRHVKD

[1251] ORF8_{—}9VSP is a putative sortase. An example of an amino acid sequence of ORF8_{—}9VSP is set forth in SEQ ID NO:214.

SEQ ID NO: 214

MSRTKLRALLGYLLMLVACLIPIYCFGQMVLQSLGQVKGHATFVKSMTTE
MYQEQQNHSLAYNQRLASQNRIVDPFLAEGYEVNYQVSDDPDAVYGYLSI
PSLEIMEPVYLGAGYHHLGMGLAHVDGTPLPLDGTGIRSVIAGHRAEPSH
VFFRHLDQLKVGDALYYDNGQEIVEYQMMDTEIILPSEWEKLESVSSKNI
MTLITCDPIPTFNKRLLVNFERVAVYQKSDPQTAAVARVAFTKEGQSVSR
VATSQWLYRGLVVLAFLGILFVLWKLARLLRGK

[1252] As discussed above, a S. pneumoniae AI sequence is present in the 14 CSR 10 S. pneumoniae genome. Examples of S. pneumoniae AI sequences from 14 CSR 10 are set forth below.

[1253] ORF2_{—}14CSR is a transcriptional regulator. An example of an amino acid sequence of ORF2_{—}14CSR is set forth in SEQ ID NO:215.

SEQ ID NO: 215

MLNKYIEKRITDKITILNILLDIRSIELDELSTLTSLQSKSLLSILQELQ
ETFEEELTFNLDTQQVQLIEHHSHQTNYYFHQLYNQSTILKILRFFLLQG
NQSFNEFTQKEYISIATGYRVRQKCGLLLRSVGLDLVKNQVVGPEYRIRF
LIALLQFHFGIEIYDLNDGSMDWVTHMIVQSNSQLSHELLEITPDEYVHF
SILVALTWKRREFPLEFPESKEFEKLKNLFMYPILMEHCQTYLEPHANMT
FTQEELDYIFLVYCSANSSFSKDKWNQEKKTHTIQLILQHTRGKHLLSKF
KNILGNDISNSLSFLTALTFLTRTFLFGLQNLVPYYNYYEHYGIESDKPL
YHISKAIVQEWMTEQKIEGVIDQHRLYLFSLYLTETIFSSLPAIPIFIIL
NNQADVNLIKSIILRNFTDKVASVTGYNILISPPPSEEHLTEPLIIITTK
EYLPYVKKQYPKGKHHFLTIALDLHVSQQRLIYQTIVDIRKEAFDKRVAM
IAKKAHYLL

[1254] ORF3_{—}14CSR is a cell wall surface protein. An example of an amino acid sequence of ORF3_{—}14CSR is set forth in SEQ ID NO:216.

SEQ ID NO: 216

MKKVRKIFQKAVAGLCCISQLTAFSSIVALAETPETSPAIGKVVIKETGE
GGALLGDAVFELKNNTDGTTVSQRTEAQTGEAIFSNIKPGTYTLTEAQPP
VGYKPSTKQWTVEVEKNGRTTVQGEVQENREEALSDQYPQTGTYPDVQTP
YQIIKVDGSEKNGQHKALNPNPYERVIPEGTLSKRIYQVNNLDDNQYGIE
LTVSGKTTVETKEASTPLDVVILLDNSNSMSNIRHNHAHRAEKAGEATRA
LVDKITSNPDNRVALVTYGSTIFDGSEATVEKGVADANGKILNDSALWTF
DRTTFTAKTYNYSFLNLTSDPTDIQTIKDRIPSDAEELNKDKLMYQFGAT
FTQKALMTADDILTKQARPNSKKVIFHITDGVPTMSYPINFKYTFTTQSY
RTQLNNFKAKTPNSSGILLEDFVTWSADGEHKIVRGDGESYQMFTKKPVT
DQYGVHQILSITSMEQRAKLVSAGYRFYGTDLYLYWRDSILAYPFNSSTD
WITNHGDPTTWYYNGNMAQDGYDVFTVGVGVNGDPGTDEATATRFMQSIS
SSPDNYTNVADPSQILQELNRYFYTIVNEKKSIENGTITDPMGELIDFQL
GADGRFDPADYTLTANDGSSLVNNVPTGGPQNDGGLLKNAKVFYDTTEKR
IRVTGLYLGTGEKVTLTYNVRLNDQFVSNKFYDTNGRTTLHPKEVEKNTV
RDFPIPKIRDVRKYPEITIPKEKKLGEIEFIKINKNDKKPLRDAVFSLQK
QHPDYPDIYGAIDQNGTYQNVFTGEDGKLTFKNLSDGKYRLFENSEPAGY
KPVQNKPIVAFQIVNGEVRDVTSIVPQDIPAGYEFTNDKHYITNEPIPPK
REYPRTGGIGMLPFYLIGCMMMGGVLLYTRKHP

[1255] ORF4_{—}14CSR is a cell wall surface protein. An example of an amino acid sequence of ORF4_{—}14CSR is set forth in SEQ ID NO:217.

SEQ ID NO: 217

MKSINKFLTMLAALLLTASSLFSAATVFAADNVSTAPDAVTKTLTIHKLL
LSEDDLKTWDTNGPKGYDGTQSSLKDLTGVVAEEPINVYFELQKYNLTDG
KEKENLKDDSKWTTVHGGLTTKDGLKIETSTLKGVYRIREDRTKTTYVGP
NGQVLTGSKAVPALVTLPLVNNNGTVIDAHVFPKNSYNKPVVDKRIADTL
NYNDQNGLSIGTKIPYVVNTTIPSNATFATSFWSDEMTEGLTYNEDVTIT
LNNVAMDQADYEVTKGNNGFNLKLTEAGLAKINGKDADQKIQITYSATLN
SLAVADIPESNDITYHIGNHQDHGNTPKPTKPNNGQITVTKTWDSQPAPE
GVKATVQLVNAKTGEKVGAPVELSENNWTYTWSGLDNSIEYKVEEEYNGY
SAEYTVESKGKLGVKNWKDNNPAPINPEEPRVKTYGKKFVKVDQKDTRLE
NAQFVVKKADSNKYIAFKSTAQQAADEKAAATAKQKLDAAVAAYTNAADK
QAAQALVDQAQQEYNVAYKEAKFGYVEVAGKDEAMVLTSNTDGQFQISGL
AAGTYKLEEIKAPEGFAKIDDVEFVVGAGSWNQGEFNYLKDVQKNDATKV
VNKKITIPQTGGIGTIIFAVAGAAIMGIAVYAYVKNNKDEDQLA

[1256] ORF5_{—}14CSR is a cell wall surface protein. An example of an amino acid sequence of ORF5_{—}14CSR is set forth in SEQ ID NO:218.

SEQ ID NO: 218

MTMQKMQKMISRIFFVMALVFSLVWGAHAVQAQEDHTLVLQLENYQEVVS
QLPSRDGHRLQVWKLDDSYSYDDRVQIVRDLHSWDENKLSSFKKTSFEMT
FLENQIEVSHIPNGLYYVRSIIQTDAVSYPAEFLFEMTDQTVEPLVIVAK
KTDTMTTKVKLIKVDQDHNRLEGVGFKLVSVARDGSEKEVPLIGEYRYSS
SGQVGRTLYTDKNGEIFVTNLPLGNYRFKEVEPLAGYAVTTLDTLVQLVD
HQLVTITVVKQKLPRGNVDFMKVDGRTNTSLQGAMFKVMKEESGHYTPVL
QNGKEVVVTSGKDGRFRVEGLEYGTYYLWELQAPTGYVQLTSPVSFTIGK
DTRKELVTVVKNNKRPRIDVPDTGEETLYILMLVAILLFGSGYYLTKKPN
N

[1257] ORF6_{—}14CSR is a putative sortase. An example of an amino acid sequence of ORF6_{—}14CSR is set forth in SEQ ID NO:219.

SEQ ID NO: 219

MLIKMVKTKKQKRNNLLLGVVFFIGMAVMAYPLVSRLYYRVESNQQIADF
DKEKATLDEADIDERMKLAQAFNDSLNNVVSGDPWSEEMKKKGRAEYARM
LEIHERMGHVEIPVIDVDLPVYAGTAEEVLQQGAGHLEGTSLPIGGNSTH
AVITAHTGLPTAKMFTDLTKLKVGDKFYVHNIKEVMAYQVDQVKVIEPTN
FDDLLIVPGHDYVTLLTCTPYMINTHRLLVRGHRIPYVAEVEEEFIAANK
LSHLYRYLFYVAVGLIVILLWIIRRLRKKKKQPEKALKALKAARKEVKVE
DGQQ

[1258] ORF7_{—}14CSR is a putative sortase. An example of an amino acid sequence of ORF7_{—}14CSR is set forth in SEQ ID NO:220.

SEQ ID NO: 220

MDNSRRSRKKGTKKKKHPLILLLIFLVGFAVAIYPLVSRYYYRIESNEVI
KEFDETVSQMDKAELEERWRLAQAFNATLKPSEILDPFTEQEKKKGVSEY
ANMLKVHERIGYVEIPAIDQEIPMYVGTSEEILQKGAGLLEGASLPVGGE
NTHTVVTAHRGLPTAELFSQLDKMKKGDVFYLHVLDQVLAYQVDQILTVE
PNDFEPVLIQHGEDYATLLTCTPYMINSHRLLVRGKRIPYTAPIAERNRA
VRERGQFWLWLLLAALVMILVLSYGVYRHRRIVKGLEKQLEEHHVKG

[1259] ORF8_{—}14CSR is a putative sortase. An example of an amino acid sequence of ORF8_{—}14CSR is set forth in SEQ ID NO:221.

SEQ ID NO: 221

MSKAKLQKLLGYLLMLVALVIPVYCFGQMVLQSLGQVKGHEIFSESVTAD
SYQEQLQRSLDYNQRLDSQNRIVDPFLAEGYEVNYQVSDDPDAVYGYLSI
PSLEIMEPVYLGADYHHLAMGLAHVDGTPLPVEGKGIRSVIAGHRAEPSH
VFFRHLDQLKVGDALYYDNGQEIVEYQMMDTEIILPSEWEKLESVSSKNI
MTLITCDPIPTFNKRLLVNFERVAVYQKSDPQTAAVARVAFTKEGQSVSR
VATSQWLYRGLVVLAFLGILFVLWKLARLLRGK

[1260] As discussed above, a S. pneumoniae AI sequence is present in the 19F Taiwan 14 S. pneumoniae genome. Examples of S. pneumoniae AI sequences from 19F Taiwan 14 are set forth below.

[1261] ORF2_{—}19FTW is a transcriptional regulator. An example of an amino acid sequence of ORF2_{—}19FTW is set forth in SEQ ID NO:222.

SEQ ID NO: 222

MLNKYIEKRITDKITILNILLDIRSIELDELSTLTSLQSKSLLSILQELQ
ETFEEELTFNLDTQQVQLIEHHSHQTNYYFHQLYNQSTILKILRFFLLQG
NQSFNEFTQKEYISIATGYRVRQKCGLLLRSVGLDLVKNQVVGPEYRIRF
LIALLQFHFGIEIYDLNDGSMDWVTHMIVQSNSQLSHELLEITPDEYVHF
SILVALTWKRREFPLEFPESKEFEKLKNLFMYPILMEHCQTYLEPHANMT
FTQEELDYIFLVYCSANSSFSKDKWNQEKKTHTIQLILQHTRGKHLLSKF
NNILGNDISNSLSFLTALTFLTRTFLFGLQNLVPYYNYYEHYGIESDKPL
YHISKAIVQEWMTEQKIEGVIDQHRLYLFSLYLTETIFSSLPAIPIFIIL
NNQADVNLIKSIILRNFTDKVASVTGYNILISPPPSEEHLTEPLIIITTK
EYLPYVKKQYPKGKHHFLTIALDLHVSQQRLIYQTIVDIRKEAFDKRVAM
IAKKAHYLL

[1262] ORF3_{—}19FTW is a cell wall surface protein. An example of an amino acid sequence of ORF3_{—}19FTW is set forth in SEQ ID NO:223.

SEQ ID NO: 223

MKKVRKIFQKAVAGLCCISQLTAFSSIVALAETPETSPAIGKVVIKETGE
GGALLGDAVFELKNNTDGTTVSQRTEAQTGEAIFSNIKPGTYTLTEAQPP
VGYKPSTKQWTVEVEKNGRTTVQGEQVENREEALSDQYPQTGTYPDVQTP
YQIIKVDGSEKNGQHKALMPNPYERVIPEGTLSKRIYQVNNLDDNQYGIE
LTVSGKTVYERKDKSVPLDVVILLDNSNSMSNIRNKNARRAERAGEATRS
LIDKITSDPENRVALVTYASTIFDGTEFTVEKGVADKNGKRLNDSLFWNY
DQTSFTTNTKDYSYLKLTNDKNDIVELKNKVPTEAEDHDGNRLMYQFGAT
FTQKALMKADEILTQQARQNSQKVIFHITDGVPTMSYPINFNHATFAPSY
QNQLNAFFSKSPNKDGILLSDFITQATSGEHTIVRGDGQSYQMFTDKTVY
EKGAPAAFPVKPEKYSEMKAVGYAVIGDPINGGYIWLNWRESILAYPFNS
NTAKITNHGAPTRWYYNGNIAPDGYDVFTVGIGINGDPGTDEATATSFMQ
SISSKPENYTNVTDTTKILEALNRYFHTIVTEKKSIENGTITDPMGELID
LQLGTDGRFDPADYTLTANDGSRLENGQAVGGPQNGDDLLKNAKVFYDTT
EKRIRVTGLYLGTGEKVTLTYNVRLNDQFVSNKFYDTNGRTTLHPKEVEK
NTVRDFPIPKIRDVRKYPAITAIKEKKLGEIEFIKINKNDKKPLRDAVFS
LQKQHPDYPDIYGAIDQNGTYQNVRTGEDGKLTFKNLSDGKYRLFENSEP
AGYKPVQNKPIVAFQIVNGEVRDVTSIVPQDIPAGYEFTNDKHYITNEPI
PPKREYPRTGGIGMLPFYLIGCMMMGGVLLYTRKHP

[1263] ORF4_{—}19FTW is a cell wall surface protein. An example of an amino acid sequence of ORF4_{—}19FTW is set forth in SEQ ID NO:224.

SEQ ID NO: 224

MKSINKFLTMLAALLLTASSLFSAATVFAAGTTTTSVTVHKLLATDGDMD
KIANELETGNYAGNKVGVLPANAKEIAGVMFVWTNTNNEIIDENGQTLGV
NIDPQTFKLSGAMPATAMKKLTEAEGAKFNTANLPAAKYKIYEIHSLSTY
VGEDGATLTGSKAVPIEIELPLNDVVDAHVYPKNTEAKPKIDKDFKGKAN
PDTPRVDKDTPVNHQVGDVVEYEIVTKIPALANYATANWSDRMTEGLAFN
KGTVKVTVDDVALEAGDYALTEVATGFDLKLTDAGLAKVNDQNAEKTVKI
TYSATLNDKAIVEVPESNDVTFNYGNNPDHGNTPKPNKPNENGDLTLTKT
WVDATGAPIPAGAEATFDLVNAQTGKVVQTVTLTTDKNTVTVNGLDKNTE
YKFVERSIKGYSADYQEITTAGEIAVKNWKDENPKPLDPTEPKVVTYGKK
FVKVNDKDNRLAGAEFVIANADNAGQYLARKADKVSQEEKQLVVTTKDAL
DRAVAAYNALTAQQQTQQEKEKVDKAQAAYNAAVIAANNAFEWVADKDNE
NVVKLVSDAQGRFEITGLLAGTYYLEETKQPAGYALLTSRQKFEVTATSY
SATGQGIEYTAGSGKDDATKVVNKKITIPQTGGIGTIIFAVAGAVIMGIA
VYAYVKNNKDEDQLA

[1264] ORF5_{—}19FTW is a cell wall surface protein. An example of an amino acid sequence of ORF5_{—}19FTW is set forth in SEQ ID NO:225.

SEQ ID NO: 225

MTMQKMQKMISRIFFVMALCFSLVWGAHAVQAQEDHTLVLQLENYQEVVS
QLPSRDGHRLQVWKLDDSYSYDNRVQIVRDLHSWDENKLSSFKKTSFEMT
FLENQIEVSHIPNGLYYVRSIIQTDAVSYPAEFLFEMTDQTVEPLVIVAK
KADTVTTKVKLIKVDQDHNRLEGVGFKLVSVARDGSEKEVPLIGEYRYSS
SGQVGRTLYTDKNGEIVVTNLPLGTYRFKEVEPLAGYTVTTMDTDVQLVD
HQLVTITVVNQKLPRGNVDFMKVDGRTNTSLQGAMFKVMKEENGHYTPVL
QNGKEVVVASGKDGRFRVEGLEYGTYYLWELQAPTGYVQLTSPVSFTIGK
DTRKELVTVVKNNKRPRIDVPDTGEETLYILMLVAILLFGSGYYLTKKTN
N

[1265] ORF6_{—}19FTW is a putative sortase. An example of an amino acid sequence of ORF6_{—}19FTW is set forth in SEQ ID NO:226.

SEQ ID NO: 226

MLIKMAKTKKQKRNNLLLGVVFFIGMAVMAYPLVSRLYYRVESNQQIADF
DKEKATLDEADIDERMKLAQAFNDSLNNVVSGDPWSEEMKKKGRAEYARM
LEIHERMGHVEIPAIDVDLPVYAGTAEEVLQQGAGHLEGTSLPIGGNSTH
AVITAHTGLPTAKMFTDLTKLKVGDKFYVHNIKEVMAYQVDQVKVEIPTN
FDDLLIVPGHDYVTLLTCTPYMINTHRLLVRGHRIPYVAEVEEEFIAANK
LSHLYRYLFYVAVGLIVILLWIIRRLRKKKRQSERALKALKEATKEVKVE
DE

[1266] ORF7_{—}19FTW is a putative sortase. An example of an amino acid sequence of ORF7_{—}19FTW is set forth in SEQ ID NO:227.

SEQ ID NO: 227

MSKSRYSRKKSVKKKKNPFILLLIFLVGALVAMYPLVSRYYYRIESNEVI
KEFDETVSQMDKAELEERWRLAQAFNATLKPSEILDPFTDQEKKQGVSEY
ANMLKVHERIGYVEIPAIEQEIPMYVGTSEDILQKGAGLLEGASLPVGGE
NTHTVITAHRGLPTAELFSQLDKMKKGDIFYLHVLDQVLAYQVDQIVTVE
PNDFEPVLIQHGQDYATLLTCTPYMINSHRLLVRGKRIPYTAPIAERNRA
VRERGQFWLWLLLGAMAVILLLLYRVYRNRRIVKGLEKQLEGRHVKD

[1267] ORF8_{—}19FTW is a putative sortase. An example of an amino acid sequence of ORF8_{—}19FTW is set forth in SEQ ID NO:228.

SEQ ID NO: 228

MSRTKLRALLGYLLMLVACLIPIYCFGQMVLQSLGQVKGHATFVKSMTTE
MYQEQQNHSLAYNQRLASQNRIVDPFLAEGYEVNYQVSDDPDAVYGYLSI
PSLEIMEPVYLGADYHHLGMGLAHVDGTPLPLDGTGIRSVIAGHRAEPSH
VFFRHLDQLKVGDALYYNDGQEIVEYQMMDTEIILPSEWEKLESVSSKNI
MTLITCDPIPTFNKRLLVNFERVAVYQKSDPQTAAVARVAFTKEGQSVSR
VATSQWLYRGLVVLAFLGILFVLWKLARLLRGK

[1268] As discussed above, a S. pneumoniae AI sequence is present in the 23F Taiwan 15 S. pneumoniae genome. Examples of S. pneumoniae AI sequences from 23F Taiwan 15 are set forth below.

[1269] ORF2_{—}23FTW is a transcriptional regulator. An example of an amino acid sequence of ORF2_{—}23FTW is set forth in SEQ ID NO:229.

SEQ ID NO: 229

MLNKYIEKRITDKITILNILLDIRSIELDELSTLTSLQSKSLLSILQELQ
ETFEEELTFNLDTQQVQLIEHHSHQTNYYFQHLYNQSTILKILRFFLLQG
NQSFNEFTQKEYISIATGYRVRQKCGLLLRSVGLDLVKNQVVGPEYRIRF
LIALLQFHFGIEIYDLNGDSMDWVTHMIVQSNSQLSHELLEITPDEYVHF
SILVALTWKRREFPLEFPESKEFEKLKNLFMYPILMEHCQTYLEPHANMT
FTQEELDYIFLVYCSANSSFSKDKWNQEKKTHTIQLILQHTRGKHLLSKF
KNILGNDISNSLSFLTALTFLTRTFLFGLQNLVPYYNYYEHYGIESDKPL
YHISKAIVQEWMTEQKIEGVIDQHRLYLFSLYLTETIFSSLPAIPIFIIL
NNQADVNLIKSIILRNFTDKVASVTGYNILISPPPSEEHLTEPLIIITTK
EYLPYVKKQYPKGKHHFLTIALDLHVSQQRLIYQTIVDIRKEAFDKRVAM
IAKKAHYLL

[1270] ORF3_{—}23FTW is a cell wall surface protein. An example of an amino acid sequence of ORF3_{—}23FTW is set forth in SEQ ID NO:230.

SEQ ID NO: 230

MKKVRKIFQKAVAGLCCISQLTAFSSIVALAETPETSPAIGKVVIKETGE
GGALLGDAVFELKNNTDGTTVSQRTEAQTGEAIFSNIKPGTYTLTEAQPP
VGYKPSTKQWTVEVEKNGRTTVQGEQVENREEALSDQYPQTGTYPDVQTP
YQIIKVDGSEKNGQHKALNPNPYERVIPEGTLSKRIYQVNNLDDNQYGIE
LTVSGKTVYEQKDKSVPLDVVILLDNSNSMSNIRNKNARRAERAGEATRS
LIDKITSDPENRVALVTYASTIFDGTEFTVEKGVADKNGKRLNDSLFWNY
DQTSFTTNTKDYSYLKLTNDKNDIVELKNKVPTEAEDHDGNRLMYQFGAT
FTQKALMKADEILTQQARQNSQKVIFHITDGVPTMSYPINFNHATFAPSY
QNQLNAFFSKSPNKDGILLSDFITQATSGEHTIVRGSGQSYQMFTDKTVY
EKGAPAAFPVKPEKYSEMKAAGYAVIGDPINGGYIWLNWRESILAYPFNS
NTAKITNHGDPTRWYYNGNIAPDGYDVFTVGIGINGDPGTDEATATSFMQ
SISSKPENYTNVTDTTKILEQLNRYFHTIVTEKKSIENGTITDPMGELID
LQLGTDGRFDPADYTLTANDGSRLENGQAVGGPQNDGGLLKNAKVLYDTT
EKRIRVTGLYLGTDEKVTLTYNVRLNDEFVSNKFYDTNGRTTLHPKEVEQ
NTVRDFPIPKIRDVRKYPEITISKEKKLGDIEFIKVNKNDKKPLRDAVFS
LQKQHPDYPDIYGAIDQNGTYQNVRTGEDGKLTFKNLSDGKYRLFENSEP
AGYKPVQNKPIVAFQIVNGEVRDVTSIVPQDIPAGYEFTNDKHYITNEPI
PPKREYPRTGGIGMLPFYLIGCMMMGGVLLYTRKHP

[1271] ORF4_{—}23FTW is a cell wall surface protein. An example of an amino acid sequence of ORF4_{—}23FTW is set forth in SEQ ID NO:231.

SEQ ID NO: 231

MKSINKFLTILAALLLTVSSLFSAATVFAAEQKTKTLTVHKLLMTDQELD
AWNSDAITTAGYDGSQNFEQFKQLQGVPQGVTEISGVAFELQSYTGPQGK
EQENLTNDAVWTAVNKGVTTETGVKFDTEVLQGTYRLVEVRKESTYVGPN
GKVLTGMKAVPALITLPLVNQNGVVENAHVYPKNSEDKPTATKTFDTAAG
FVDPGEKGLAIGTKVPYIVTTTIPKNSTLATAFWSDEMTEGLDYNGDVVV
NYNGQPLDNSHYTLEAGHNGFILKLNEKGLEAINGKDAEATITLKYTATL
NALAVADVPEANDVTFHYGNNPGHGNTPKPNKPKNGELTITKTWADAKDA
PIAGVEVTFDLVNAQTGEVVKVPGHETGIVLNQTNNWTFTATGLDNNTEY
KFVERTIKGYSADYQTITETGKIAVKNWKDENPEPINPEEPRVKTYGKKF
VKVDQKDERLKEAQFVVKNWQGKYLALKSAAQQAVNEKAAAEAKQALDAA
IAAYTNAADKNAAQAVVDAAQKTYNDNYRAARFGYVEVERKEDALVLTSN
TDGQFQISGLAAGSYTLEETKAPEGFAKLGDVKFEVGAGSWNQGDFNYLK
DVQKNDATKVVNKKITIPQTGGIGTIIFAVAGAVIMGIAVYAYVKNNKDE
DQLA

[1272] ORF5_{—}23FTW is a cell wall surface protein. An example of an amino acid sequence of ORF5_{—}23FTW is set forth in SEQ ID NO:232.

SEQ ID NO: 232

MTMQKMQKMISRIFFVMALVFSLVWGAHAVQAQEDHTLVLQLENYQEVVS
QLPSRDGHRLQVWKLDDSYSYDNRVQIVRDLHSWDENKLSSFKKTSFEMT
FLENQIEVSHIPNGLYYVRSIIQTDAVSYPAEFLFEMTDQTVEPLVIVAK
KADTVTTKVKLIKVDQDHNRLEGVGFKLVSVARDGSEKEVPLIGEYRYSS
SGQVGRTLYTDKNGEIVVTNLPLGTYRFKEVEPLAGYTVTTMDTDVQLVD
HQLVTITVVNQKLPRGNVDFMKVDGRTNTSLQGAMFKVMKEENGHYTPVL
QNGKEVVVASGKDGRFRVEGLEYGTYYLWELQAPTGYVQLTSPVSFTIGK
DTRKELVTVVKNNKRPRIDVPDTGEETLYILMLVAILLFGSGYYLTKKTN
N

[1273] ORF6_{—}23FTW is a putative sortase. An example of an amino acid sequence of ORF6_{—}23FTW is set forth in SEQ ID NO:233.

SEQ ID NO: 233

MLIKMVKTKKQKRNNLLLGVVFFIGMAVMAYPLVSRLYYRVESNQQIADF
DKEKATLDEADIDERMKLAQAFNDSLNNVVSGDPWSEEMKKKGRAEYARM
LEIHERMGHVEIPVIDVDLPVYAGTAEEVLQQGAGQLEGTSLPIGGNSTH
AVITAHTGLPTAKMFTDLTKLKVGDKFYVHNIKEVMAYQVDQVKVIEPTN
FDDLLIVPGHDYVTLLTCTPYMINTHRLLVRGHRIPYVAEVEEEFIAANK
LSHLYRYLFYVAVGLIVILLWIIRRLRKKKKQPEKALKALKAARKEVKVE
DGQQ

[1274] ORF7_{—}23FTW is a putative sortase. An example of an amino acid sequence of ORF7_{—}23FTW is set forth in SEQ ID NO:234.

SEQ ID NO: 234

MDNSRRSRKKGTKKKKHPLILLLIFLVGFAVAIYPLVSRYYYRIESNEVI
KEFDETVSQMDKAELEERWRLAQAFNATLKPSEILDPFTEQEKKKGCSEY
ANMLKVHERIGYVEIPAIDQEIPMYVGTSEEILQKGAGLLEGASLPVGGE
NTHTVVTAHRGLPTAELFSQLDKMKKGDVFYLHVLDQVLAYQVDQILTVE
PNDFEPVLIQHGKDYATLLTCTPYMINSHRLLVRGKRIPYTAPIAERNRA
VRERGQFWLWLLLAALVMILVLSYGVYRHRRIVKGLEKQLEEHHVKG

[1275] ORF8_{—}23FTW is a putative sortase. An example of an amino acid sequence of ORF8_{—}23FTW is set forth in SEQ ID NO:235.

SEQ ID NO: 235

MSKAKLQKLLGYLLMLVALVIPVYCFGQMVLQSLGQVKGHEIFSESVTAD
SYQEQLQRSLDYNQRLDSQNRIVDPFLAEGYEVNYQVSDDPDAVYGYLSI
PSLEIMEPVYLGADYHHLAMGLAHVDGTPLPVEGKGIRSVIAGHRAEPSH
VFFRHLDQLKVGDALYYDNGQEIVEYQMMDTEIILPSEWEKLESVSSKNI
MTLITCDPIPTFNKRLLVNFERVAVYQKSDPQTAAVARVAFTKEGQSVSR
VATSQWLYRGLVVLAFLGILFVLWKLARLLRGK

[1276] As discussed above, a S. pneumoniae AI sequence is present in the 23F Poland 16 S. pneumoniae genome. Examples of S. pneumoniae AI sequences from 23F Poland 16 are set forth below.

[1277] ORF2_{—}23FP is a transcriptional regulator. An example of an amino acid sequence of ORF2_{—}23FP is set forth in SEQ ID NO:236.

SEQ ID NO: 236

MLNKYIEKRITDKITILNILLDIRSIELDELSTLTSLQSKSLLSILQELQ
ETFEEELTFNLDTQQVQLIEHHSHQTNYYFHQLYNQSTILKILRFFLLQG
NQSFNEFTQKEYISIATGYRVRQKCGLLLRSVGLDLVKNQVVGPEYRIRF
LIALLQFHFGIEIYDLNDGSMDWVTHMIVQSNSQLSHELLEITPDEYVHF
SILVALTWKRREFPLEFPESKEFEKLKNLFMYPILMEHCQTYLEPHANMT
FTQEELDYIFLVYCSANSSFSKDKWNQEKKTHTIQLILQHTRGKHLLSKF
NKNILGNDISNSLSFLTALTFLTRTFLFGLQNLVPYYNYYEHGIESDKPL
YHISKAIVQEWMTEQKIEGVIDQHRLYLFSLYLTETIFSSLPAIPIFIIL
NNQADVNLIKSIILRNFTDKVASVTGYNILISPPPSEEHLTEPLIIITTK
EYLPYVKKQYPKGKHHFLTIALDLHVSQQRLIYQTIVDIRKEAFDKRVAM
IAKKAHYLL

[1278] ORF3_{—}23FP is a cell wall surface protein. An example of an amino acid sequence of ORF3_{—}23FP is set forth in SEQ ID NO:237.

SEQ ID NO: 237

MKKVRKIFQKAVAGLCCISQLTAFSSIVALAETPETSPAIGKVVIKETGE
GGALLGDAVFELKNNTDGTTVSQRTEAQTGEAIFSNIKPGTYTLTEAQPP
VGYKPSTKQWTVEVEKNGRTTVQGEQVENREEALSDQYPQTGTYPDVQTP
YQIIKVDGSEKNGQHKALNPNPYERVIPEGTLSKRIYQVNNLDDNQYGIE
LTVSGKTTVETKEASTPLDVVILLDNSNSMSNIRHNHAHRAEKAGEATRA
LVDKITSNPDNRVALVTYGSTIFDGSEATVEKGVADANGKILNDSALWTF
DRTTFTAKTYNYSFLNLTSDPTDQITIKDRIPSDAEELNKDKLMYQFGAT
FTQKALMTADDILTKQARPNSKKVIFHITDGVPTMSYPINFKYTFTTQSY
RTQLNNFKAKTPNSSGILLEDFVTWSADGEHKIVRGDGESYQMFTKKPVT
DQYGVHQILSITSMEQRAKLVSAGYRFYGTDLYLYWRDSILAYPFNSSTD
WITNHGDPTTWYYNGNMAQDGYDVFTVGVGVNGDPGTDEATATRFMQSIS
SSPDNYTNVADPSQILQELNRYFYTIVNEKKSIENGTITDPMGELIDFQL
GADGRFDPADYTLTANDGSSLVNNVPTGGPQNDGGLLKNAKVFYDTTEKR
IRVTGLYLGTGEKVTLTYNVRLNDQFVSNKFYDTNGRTTLHPKEVEKNTV
RDFPIPKIRDVRKYPEITIPKEKKLGEIEFIKINKNDKKPLRDAVFSLQK
QHPDYPDIYGAIDQNGTYQNVRTGEDGKLTFKNLSDGKYRLFENSEPAGY
KPVQNKPIVAFQIVNGEVRDVTSIVPQDIPAGYEFTNDKHYITNEPIPPK
REYPRTGGIGMLPFYLIGCMMMGGVLLYTRKNP

[1279] ORF4_{—}23FP is a cell wall surface protein. An example of an amino acid sequence of ORF4_{—}23FP is set forth in SEQ ID NO:238.

SEQ ID NO: 238

MKSINKFLTMLAALLLTASSLFSAATVFAADNVSTAPDAVTKTLTIHKLL
LSEDDLKTWDTNGPKGYDGTQSSLKDLTGVVAEEIPNVYFELQKYNLTDG
KEKENLKDDSKWTTVHGGLTTKDGLKIETSTLKGVYRIREDRTKTTYVGP
NGQVLTGSKAVPALVTLPLVNNNGTVIDAHVFPKNSYNKPVVDKRIADTL
NYNDQNGLSIGTKIPYVVNTTIPSNATFATSFWSDEMTEGLTYNEDVTIT
LNNVAMDQADYEVTKGINGFNLKLTEAGLAKINGKDADQKIQITYSATLN
SLAVADIPSENDITYHYGNHQDHGNTPKPTKPNNGQITVTKTWDSQPAPE
GCKATVQLVNAKTGEKVGAPVELSENNWTYTWSGLDNSIEYKVEEEYNGY
SAEYTVESKGKLGVKNWKDNNPAPINLEEPRVKTYGKKFVKVDQKDTRLE
NAQFVVKKADSNKYIAFKSTAQQAADEKAAATAKQKLDAAVAAYTNAADK
QAAQALVDQAQQEYNVAYKEAKFGYVEVAGKDEAMVLTSNTDGQFQISGL
AAGTYKLEEIKAPEGFAKIDDVEFVVGAGSWNQGEFNYLKDVQKNDATKV
VNKKITIPQTGGIGTIIFAVAGAVIMGIAVYAYVKNNKDEDQLA

[1280] ORF5_{—}23FP is a cell wall surface protein. An example of an amino acid sequence of ORF5_{—}23FP is set forth in SEQ ID NO:239.

SEQ ID NO: 239

MTMQKMQKMISRIFFVMALVFSLVWGAHAVQAQEDHTLVLQLENYQEVVS
QLPSRDGHRLQVWKLDDSYSYDNRVQIVRDLHSWDENKLSSFKKTSFEMT
FLENQIEVSHIPNGLYYVRSIIQTDAVSYPAEFLFEMTDQTVEPLVIVAK
KADTVTTKVKLIKVDQDHNRLEGVGFKLVSVARDGSEKEVPLIGEYRYSS
SGQVGRTLYTDKNGEIVVTNLPLGTYRFKEVEPLAGYAVTTMDTDVQLVD
HQLVTITVVNQKLPRGNVDFMKVDGRTNTSLQGAMFKVMKEENGHYTPVL
QNGKEVVVASGKDGRFRVEGLEYGTYYLWELQAPTGYVQLTSPVSFTIGK
DTRKELVTVVKNNKRPRIDVPDTGEETLYILMLVAILLFGSGYYLTKKTN
N

[1281] ORF6_{—}23FP is a putative sortase. An example of an amino acid sequence of ORF6_{—}23FP is set forth in SEQ ID NO:240.

SEQ ID NO: 240

MLIKMAKTKKQKRNNLLLGVVFFIGIAVMAYPLVSRLYYRVESNQQIADF
DKEKATLDEADIDERMKLAQAFNDSLNNVVSGDPWSEEMKKKGRAEYARM
LEIHERMGHVEIPAIDVDLPVYAGTAEEVLQQGAGHLEGTSLPIGGNSTH
AVITAHTGLPTAKMFTDLTKLKVGDKFYVHNIKEVMAYQVDQVKVEIPTN
FDDLLIVPGHDYVTLLTCTPYMINTHRLLVRGHRIPYVAEVEEEFIAANK
LSHLYRYLFYVAVGLIVILLWIIRRLRKKKRQSERALKALKEATKEVKVE
DE

[1282] ORF7_{—}23FP is a putative sortase. An example of an amino acid sequence of ORF7_{—}23FP is set forth in SEQ ID NO:241.

SEQ ID NO: 241

MSKSRYSRKKSVKKKKNPFILLLIFLVGLAVAMYPLVSRYYYRIESNEVI
KEFDETVSQMDKAELEERWRLAQAFNATLKPSEILDPFTEQEKKKGVSEY
ANMLKVHERIGYVEIPAIDQEIPMYVGTSEEILQKGAGLLEGASLPVGGE
NTHTVVTAHRGLPTAELFWQLDKMKKGDIFYLHVLDQVLAYQVDQIVTVE
PNDFEPVLIQHGEDYATLLTCTPYMINSHRLLVRGKRIPYTAPIAERNRA
VRERGQFWLWLLLGAMAVILLLLYRVYRNRRIVKGLEKQLEGHHVKD

[1283] ORF8_{—}23FP is a putative sortase. An example of an amino acid sequence of ORF8_{—}23FP is set forth in SEQ ID NO:242.

SEQ ID NO: 242

MSRTKLRALLGYLLMLVACLIPIYCFGQMVLQSLGQVKGHATFVKSMTTE
MYQEQQNHSLAYNQRLASQNRIVDPFLAEGYEVNYQVSDDPDAVYGYLSI
PSLEIMEPVYLGADYHHLGMGLAHVDGTPLPLDGTGIRSVIAGHRAEPSH
VFFRHLDQLKVGDALYYNDGQEIVEYQMMDTEIILPSEWEKLESVSSKNI
MTLITCDPIPTFNKRLLVNFERVAVYQKSDPQTAAVARVAFTKEGQSVSR
VATSQWLYRGLVVLAFLGILFVLWKLARLLRGK

[1284] Immunogenic compositions of the invention comprising AI antigens may further comprise one or more antigenic agents. Preferred antigens include those listed below. Additionally, the compositions of the present invention may be used to treat or prevent infections caused by any of the below-listed microbes. Antigens for use in the immunogenic compositions include, but are not limited to, one or more of the following set forth below, or antigens derived from one or more of the following set forth below:

[1285] Bacterial Antigens

[1286] N. meningitides: a protein antigen from N. meningitides serogroup A, C, W135, Y, and/or B (1-7); an outer-membrane vesicle (OMV) preparation from N. meningitides serogroup B. (8, 9, 10, 11); a saccharide antigen, including LPS, from N. meningitides serogroup A, B, C W135 and/or Y, such as the oligosaccharide from serogroup C (see PCT/US99/09346; PCT IB98/01665; and PCT IB99/00103);

[1287] Streptococcus pneumoniae: a saccharide or protein antigen, particularly a saccharide from Streptooccus pneumoniae;

[1288] Streptococcus agalactiae: particularly, Group B streptococcus antigens;

[1289] Streptococcus pyogenes: particularly, Group A streptococcus antigens;

[1290] Enterococcus faecalis or Enterococcus faecium: Particularly a trisaccharide repeat or other Enterococcus derived antigens provided in U.S. Pat. No. 6,756,361;

[1291] Helicobacter pylori: including: Cag, Vac, Nap, HopX, HopY and/or urease antigen;

[1292] Bordetella pertussis: such as petussis holotoxin (PT) and filamentous haemagglutinin (FHA) from B. pertussis, optionally also combination with pertactin and/or agglutinogens 2 and 3 antigen;

[1293] Staphylococcus aureus: including S. aureus type 5 and 8 capsular polysaccharides optionally conjugated to nontoxic recombinant Pseudomonas aeruginosa exotoxin A, such as StaphVAX™, or antigens derived from surface proteins, invasins (leukocidin, kinases, hyaluronidase), surface factors that inhibit phagocytic engulfment (capsule, Protein A), carotenoids, catalase production, Protein A, coagulase, clotting factor, and/or membrane-damaging toxins (optionally detoxified) that lyse eukaryotic cell membranes (hemolysins, leukotoxin, leukocidin);

[1294] Staphylococcus epidermis: particularly, S. epidermidis slime-associated antigen (SAA);

[1295] Staphylococcus saprophyticus: (causing urinary tract infections) particularly the 160 kDa hemagglutinin of S. saprophyticus antigen;

[1296] Pseudomonas aeruginosa: particularly, endotoxin A, Wzz protein, P. aeruginosa LPS, more particularly LPS isolated from PAO1 (O5 serotype), and/or Outer Membrane Proteins, including Outer Membrane Proteins F (OprF) (Infect Immun. 2001 May; 69(5): 3510-3515);

[1297] Bacillus anthracis (anthrax): such as B. anthracis antigens (optionally detoxified) from A-components (lethal factor (LF) and edema factor (EF)), both of which can share a common B-component known as protective antigen (PA);

[1298] Moraxella catarrhalis: (respiratory) including outer membrane protein antigens (HMW-OMP), C-antigen, and/or LPS;

[1299] Yersinia pestis (plague): such as F1 capsular antigen (Infect Immun. 2003 January; 71(1)): 374-383, LPS (Infect Immun. 1999 October; 67(10): 5395), Yersinia pestis V antigen (Infect Immun. 1997 November; 65(11): 4476-4482);

[1300] Yersinia enterocolitica (gastrointestinal pathogen): particularly LPS (Infect Immun. 2002 August; 70(8): 4414);

[1301] Yersinia pseudotuberculosis: gastrointestinal pathogen antigens;

[1302] Mycobacterium tuberculosis: such as lipoproteins, LPS, BCG antigens, a fusion protein of antigen 85B (Ag85B) and/or ESAT-6 optionally formulated in cationic lipid vesicles (Infect Immun. 2004 October; 72(10): 6148), Mycobacterium tuberculosis (Mtb) isocitrate dehydrogenase associated antigens (Proc Natl Acad Sci USA. 2004 Aug. 24; 101(34): 12652), and/or MPT51 antigens (Infect Immun. 2004 July; 72(7): 3829);

[1303] Legionella pneumophila (Legionnairs' Disease): L. pneumophila antigens—optionally derived from cell lines with disrupted asd genes (Infect Immun. 1998 May; 66(5): 1898);

[1304] Rickettsia: including outer membrane proteins, including the outer membrane protein A and/or B (OmpB) (Biochim Biophys Acta. 2004 Nov. 1; 1702(2):145), LPS, and surface protein antigen (SPA) (J Autoimmun. 1989 June; 2 Suppl:81);

[1305] E. coli: including antigens from enterotoxigenic E. coli (ETEC), enteroaggregative E. coli (EAggEC), diffusely adhering E. coli (DAEC), enteropathogenic E. coli (EPEC), and/or enterohemorrhagic E. coli (EHEC);

[1306] Vibrio cholerae: including proteinase antigens, LPS, particularly lipopolysaccharides of Vibrio cholerae II, O1 Inaba O-specific polysaccharides, V. cholera O139, antigens of IEM108 vaccine (Infect Immun. 2003 October; 71(10):5498-504), and/or Zonula occludens toxin (Zot);

[1307] Salmonella typhi (typhoid fever): including capsular polysaccharides preferably conjugates (Vi, i.e. vax-TyVi);

[1308] Salmonella typhimurium (gastroenteritis): antigens derived therefrom are contemplated for microbial and cancer therapies, including angiogenesis inhibition and modulation of flk;

[1309] Listeria monocytogenes (sytemic infections in immunocompromised or elderly people, infections of fetus): antigens derived from L. monocytogenes are preferably used as carriers/vectors for intracytoplasmic delivery of conjugates/associated compositions of the present invention;

[1310] Porphyromonas gingivalis: particularly, P. gingivalis outer membrane protein (OMP);

[1311] Tetanus: such as tetanus toxoid (TT) antigens, preferably used as a carrier protein in conjunction/conjugated with the compositions of the present invention;

[1312] Diphtheria: such as a diphtheria toxoid, preferably CRM₁₉₇, additionally antigens capable of modulating, inhibiting or associated with ADP ribosylation are contemplated for combination/co-administration/conjugation with the compositions of the present invention, the diphtheria toxoids are preferably used as carrier proteins;

[1313] Borrelia burgdorferi (Lyme disease): such as antigens associated with P39 and P13 (an integral membrane protein, Infect Immun. 2001 May; 69(5): 3323-3334), VlsE Antigenic Variation Protein (J Clin Microbiol. 1999 December; 37(12): 3997);

[1314] Haemophilus influenzae B: such as a saccharide antigen therefrom;

[1315] Klebsiella: such as an OMP, including OMP A, or a polysaccharide optionally conjugated to tetanus toxoid;

[1316] Neiserria gonorrhoeae: including, a Por (or porn) protein, such as PorB (see Zhu et al., Vaccine (2004) 22:660-669), a transferring binding protein, such as TbpA and TbpB (See Price et al., Infection and Immunity (2004) 71(1):277-283), a opacity protein (such as Opa), a reduction-modifiable protein (Rmp), and outer membrane vesicle (OMV) preparations (see Plante et al., J Infectious Disease (2000) 182:848-855), also see e.g. WO99/24578, WO99/36544, WO99/57280, WO02/079243);

[1317] Chlamydia pneumoniae: particularly C. pneumoniae protein antigens;

[1318] Chlamydia trachomatis: including antigens derived from serotypes A, B, Ba and C are (agents of trachoma, a cause of blindness), serotypes L₁, L₂ & L₃ (associated with Lymphogranuloma venereum), and serotypes, D-K;

[1319] Treponema pallidum (Syphilis): particularly a TmpA antigen; and

[1320] Haemophilus ducreyi (causing chancroid): including outer membrane protein (DsrA).

[1321] Where not specifically referenced, further bacterial antigens of the invention may be capsular antigens, polysaccharide antigens or protein antigens of any of the above. Further bacterial antigens may also include an outer membrane vesicle (OMV) preparation. Additionally, antigens include live, attenuated, split, and/or purified versions of any of the aforementioned bacteria. The bacterial or microbial derived antigens of the present invention may be gram-negative or gram-positive and aerobic or anaerobic.

[1322] Additionally, any of the above bacterial-derived saccharides (polysaccharides, LPS, LOS or oligosaccharides) can be conjugated to another agent or antigen, such as a carrier protein (for example CRM₁₉₇). Such conjugation may be direct conjugation effected by reductive amination of carbonyl moieties on the saccharide to amino groups on the protein, as provided in U.S. Pat. No. 5,360,897 and Can J Biochem Cell Biol. 1984 May; 62(5):270-5. Alternatively, the saccharides can be conjugated through a linker, such as, with succinamide or other linkages provided in Bioconjugate Techniques, 1996 and CRC, Chemistry of Protein Conjugation and Cross-Linking, 1993.

[1323] Viral Antigens

[1324] Influenza: including whole viral particles (attenuated), split, or subunit comprising hemagglutinin (HA) and/or neuraminidase (NA) surface proteins, the influenza antigens may be derived from chicken embryos or propogated on cell culture, and/or the influenza antigens are derived from influenza type A, B, and/or C, among others;

[1325] Respiratory syncytial virus (RSV): including the F protein of the A2 strain of RSV (J Gen Virol. 2004 November; 85(Pt 11):3229) and/or G glycoprotein;

[1326] Parainfluenza virus (PIV): including PIV type 1, 2, and 3, preferably containing hemagglutinin, neuraminidase and/or fusion glycoproteins;

[1327] Poliovirus: including antigens from a family of picornaviridae, preferably poliovirus antigens such as OPV or, preferably IPV;

[1328] Measles: including split measles virus (MV) antigen optionally combined with the Protollin and or antigens present in MMR vaccine;

[1329] Mumps: including antigens present in MMR vaccine;

[1330] Rubella: including antigens present in MMR vaccine as well as other antigens from Togaviridae, including dengue virus;

[1331] Rabies: such as lyophilized inactivated virus (RabAvert™);

[1332] Flaviviridae viruses: such as (and antigens derived therefrom) yelow fever virus, Japanese encephalitis virus, dengue virus (types 1, 2, 3, or 4), tick borne encephalitis virus, and West Nile virus;

[1333] Caliciviridae; antigens therefrom;

[1334] HIV: including HIV-1 or HIV-2 strain antigens, such as gag (p24gag and p55gag), env (gp160 and gp41), pol, tat, nef, rev vpu, miniproteins, (preferably p55 gag and gp140v delete) and antigens from the isolates HIV_{IIIb}, HIV_{SF2}, HIV_{LAV}, HIV_{LAI}, HIV_{MN}, HIV-1_{CM235}, HIV-1_{US4}, HIV-2; simiam immunodeficiency virus (SIV) among others;

[1335] Rotavirus: including VP4, VPS, VP6, VP7, VP8 proteins (Protein Expr Purif. 2004 December; 38(2):205) and/or NSP4;

[1336] Pestivirus: such as antigens from classical porcine fever virus, bovine viral diarrhoea virus, and/or border disease virus;

[1337] Parvovirus: such as parvovirus B19;

[1338] Coronavirus: including SARS virus antigens, particularly spike protein or proteases therefrom, as well as antigens included in WO 04/92360;

[1339] Hepatitis A virus: such as inactivated virus;

[1340] Hepatitis B virus: such as the surface and/or core antigens (sAg), as well as the presurface sequences, pre-S1 and pre-S2 (formerly called pre-S), as well as combinations of the above, such as sAg/pre-S1, sAg/pre-S2, sAg/pre-S1/pre-S2, and pre-S1/pre-S2, (see, e.g., AHBV Vaccines—Human Vaccines and Vaccination, pp. 159-176; and U.S. Pat. Nos. 4,722,840, 5,098,704, 5,324,513; Beames et al., J. Virol. (1995) 69:6833-6838, Birnbaum et al., J. Virol. (1990) 64:3319-3330; and Zhou et al., J. Virol. (1991) 65:5457-5464);

[1341] Hepatitis C virus: such as E1, E2, E1/E2 (see, Houghton et al., Hepatology (1991) 14:381), NS345 polyprotein, NS 345-core polyprotein, core, and/or peptides from the nonstructural regions (International Publication Nos. WO 89/04669; WO 90/11089; and WO 90/14436);

[1342] Delta hepatitis virus (HDV): antigens derived therefrom, particularly δ-antigen from HDV (see, e.g., U.S. Pat. No. 5,378,814);

[1343] Hepatitis E virus (HEV); antigens derived therefrom;

[1344] Hepatitis G virus (HGV); antigens derived therefrom;

[1345] Varcicella zoster virus: antigens derived from varicella zoster virus (VZV) (J. Gen. Virol. (1986) 67:1759);

[1346] Epstein-Barr virus: antigens derived from EBV (Baer et al., Nature (1984) 310:207);

[1347] Cytomegalovirus: CMV antigens, including gB and gH (Cytomegaloviruses (J. K. McDougall, ed., Springer-Verlag 1990) pp. 125-169);

[1348] Herpes simplex virus: including antigens from HSV-1 or HSV-2 strains and glycoproteins gB, gD and gH (McGeoch et al., J. Gen. Virol. (1988) 69:1531 and U.S. Pat. No. 5,171,568);

[1349] Human Herpes Virus: antigens derived from other human herpesviruses such as HHV6 and HHV7; and

[1350] HPV: including antigens associated with or derived from human papillomavirus (HPV), for example, one or more of E1-E7, L1, L2, and fusions thereof, particularly the compositions of the invention may include a virus-like particle (VLP) comprising the L1 major capsid protein, more particular still, the HPV antigens are protective against one or more of HPV serotypes 6, 11, 16 and/or 18.

[1351] Further provided are antigens, compositions, methods, and microbes included in Vaccines, 4^{th} Edition (Plotkin and Orenstein ed. 2004); Medical Microbiology 4^{th} Edition (Murray et al. ed. 2002); Virology, 3rd Edition (W. K. Joklik ed. 1988); Fundamental Virology, 2nd Edition (B. N. Fields and D. M. Knipe, eds. 1991), which are contemplated in conjunction with the compositions of the present invention.

[1352] Additionally, antigens include live, attenuated, split, and/or purified versions of any of the aforementioned viruses.

[1353] Fungal Antigens

[1354] Fungal antigens for use herein, associated with vaccines include those described in: U.S. Pat. Nos. 4,229,434 and 4,368,191 for prophylaxis and treatment of trichopytosis caused by Trichophyton mentagrophytes; U.S. Pat. Nos. 5,277,904 and 5,284,652 for a broad spectrum dermatophyte vaccine for the prophylaxis of dermatophyte infection in animals, such as guinea pigs, cats, rabbits, horses and lambs, these antigens comprises a suspension of killed T. equinum, T. mentagrophytes (var. granulare), M. canis and/or M. gypseum in an effective amount optionally combined with an adjuvant; U.S. Pat. Nos. 5,453,273 and 6,132,733 for a ringworm vaccine comprising an effective amount of a homogenized, formaldehyde-killed fungi, i.e., Microsporum canis culture in a carrier; U.S. Pat. No. 5,948,413 involving extracellular and intracellular proteins for pythiosis. Additional antigens identified within antifungal vaccines include Ringvac bovis LTF-130 and Bioveta.

[1355] Further, fungal antigens for use herein may be derived from Dermatophytres, including: Epidermophyton floccusum, Microsporum audouini, Microsporum canis, Microsporum distortum, Microsporum equinum, Microsporum gypsum, Microsporum nanum, Trichophyton concentricum, Trichophyton equinum, Trichophyton gallinae, Trichophyton gypseum, Trichophyton megnini, Trichophyton mentagrophytes, Trichophyton quinckeanum, Trichophyton rubrum, Trichophyton schoenleini, Trichophyton tonsurans, Trichophyton verrucosum, T. verrucosum var. album, var. discoides, var. ochraceum, Trichophyton violaceum, and/or Trichophyton faviforme.

[1356] Fungal pathogens for use as antigens or in derivation of antigens in conjunction with the compositions of the present invention comprise Aspergillus fumigatus, Aspergillus flavus, Aspergillus niger, Aspergillus nidulans, Aspergillus terreus, Aspergillus sydowi, Aspergillus flavatus, Aspergillus glaucus, Blastoschizomyces capitatus, Candida albicans, Candida enolase, Candida tropicalis, Candida glabrata, Candida krusei, Candida parapsilosis, Candida stellatoidea, Candida kusei, Candida parakwsei, Candida lusitaniae, Candida pseudotropicalis, Candida guilliermondi, Cladosporium carrionii, Coccidioides Blastomyces dermatidis, Cryptococcus neoformans, Geotrichum clavatum, Histoplasma capsulatum, Klebsiella pneumoniae, Paracoccidioides brasiliensis, Pneumocystis carinii, Pythiumn insidiosum, Pityrosporum ovale, Sacharomyces cerevisae, Saccharomyces boulardii, Saccharomyces pombe, Scedosporium apiosperum, Sporothrix schenckii, Trichosporon beigelii, Toxoplasma gondii, Penicillium marneffei, Malassezia spp., Fonsecaea spp., Wangiella spp., Sporothrix spp., Basidiobolus spp., Conidiobolus spp., Rhizopus spp, Mucor spp, Absidia spp, Mortierella spp, Cunninghamella spp, and Saksenaea spp.

[1357] Other fungi from which antigens are derived include Alternaria spp, Curvularia spp, Helminthosporium spp, Fusarium spp, Aspergillus spp, Penicillium spp, Monolinia spp, Rhizoctonia spp, Paecilomyces spp, Pithomyces spp, and Cladosporium spp.

[1358] Processes for producing a fungal antigens are well known in the art (see U.S. Pat. No. 6,333,164). In a preferred method a solubilized fraction extracted and separated from an insoluble fraction obtainable from fungal cells of which cell wall has been substantially removed or at least partially removed, characterized in that the process comprises the steps of: obtaining living fungal cells; obtaining fungal cells of which cell wall has been substantially removed or at least partially removed; bursting the fungal cells of which cell wall has been substantially removed or at least partially removed; obtaining an insoluble fraction; and extracting and separating a solubilized fraction from the insoluble fraction.

[1359] STD Antigens

[1360] In particular embodiments, microbes (bacteria, viruses and/or fungi) against which the present compositions and methods can be implement include those that cause sexually transmitted diseases (STDs) and/or those that display on their surface an antigen that can be the target or antigen composition of the invention. In a preferred embodiment of the invention, compositions are combined with antigens derived from a viral or bacterial STD. Antigens derived from bacteria or viruses can be administered in conjunction with the compositions of the present invention to provide protection against at least one of the following STDs, among others: chlamydia, genital herpes, hepatitis (particularly HCV), genital warts, gonorrhoea, syphilis and/or chancroid (See, WO00/15255).

[1361] In another embodiment the compositions of the present invention are co-administered with an antigen for the prevention or treatment of an STD.

[1362] Antigens derived from the following viruses associated with STDs, which are described in greater detail above, are preferred for co-administration with the compositions of the present invention: hepatitis (particularly HCV), HPV, HIV, or HSV.

[1363] Additionally, antigens derived from the following bacteria associated with STDs, which are described in greater detail above, are preferred for co-administration with the compositions of the present invention: Neiserria gonorrhoeae, Chlamydia pneumoniae, Chlamydia trachomatis, Treponema pallidum, or Haemophilus ducreyi.

[1364] Respiratory Antigens

[1365] The antigen may be a respiratory antigen and could further be used in an immunogenic composition for methods of preventing and/or treating infection by a respiratory pathogen, including a virus, bacteria, or fungi such as respiratory syncytial virus (RSV), PIV, SARS virus, influenza, Bacillus anthracia, particularly by reducing or preventing infection and/or one or more symptoms of respiratory virus infection. A composition comprising an antigen described herein, such as one derived from a respiratory virus, bacteria or fungus is administered in conjunction with the compositions of the present invention to an individual which is at risk of being exposed to that particular respiratory microbe, has been exposed to a respiratory microbe or is infected with a respiratory virus, bacteria or fungus. The composition(s) of the present invention is/are preferably co-administered at the same time or in the same formulation with an antigen of the respiratory pathogen. Administration of the composition results in reduced incidence and/or severity of one or more symptoms of respiratory infection.

[1366] Pediatric/Geriatric Antigens

[1367] In one embodiment the compositions of the present invention are used in conjunction with an antigen for treatment of a pediatric population, as in a pediatric antigen. In a more particular embodiment the pediatric population is less than about 3 years old, or less than about 2 years, or less than about 1 years old. In another embodiment the pediatric antigen (in conjunction with the composition of the present invention) is administered multiple times over at least 1, 2, or 3 years.

[1368] In another embodiment the compositions of the present invention are used in conjunction with an antigen for treatment of a geriatric population, as in a geriatric antigen.

[1369] Other Antigens

[1370] Other antigens for use in conjunction with the compositions of the present include hospital acquired (nosocomial) associated antigens.

[1371] In another embodiment, parasitic antigens are contemplated in conjunction with the compositions of the present invention. Examples of parasitic antigens include those derived from organisms causing malaria and/or Lyme disease.

[1372] In another embodiment, the antigens in conjunction with the compositions of the present invention are associated with or effective against a mosquito born illness. In another embodiment, the antigens in conjunction with the compositions of the present invention are associated with or effective against encephalitis. In another embodiment the antigens in conjunction with the compositions of the present invention are associated with or effective against an infection of the nervous system.

[1373] In another embodiment, the antigens in conjunction with the compositions of the present invention are antigens transmissible through blood or body fluids.

[1374] Antigen Formulations

[1375] In other aspects of the invention, methods of producing microparticles having adsorbed antigens are provided. The methods comprise: (a) providing an emulsion by dispersing a mixture comprising (i) water, (ii) a detergent, (iii) an organic solvent, and (iv) a biodegradable polymer selected from the group consisting of a poly(α-hydroxy acid), a polyhydroxy butyric acid, a polycaprolactone, a polyorthoester, a polyanhydride, and a polycyanoacrylate. The polymer is typically present in the mixture at a concentration of about 1% to about 30% relative to the organic solvent, while the detergent is typically present in the mixture at a weight-to-weight detergent-to-polymer ratio of from about 0.00001:1 to about 0.1:1 (more typically about 0.0001:1 to about 0.1:1, about 0.001:1 to about 0.1:1, or about 0.005:1 to about 0.1:1); (b) removing the organic solvent from the emulsion; and (c) adsorbing an antigen on the surface of the microparticles. In certain embodiments, the biodegradable polymer is present at a concentration of about 3% to about 10% relative to the organic solvent.

[1376] Microparticles for use herein will be formed from materials that are sterilizable, non-toxic and biodegradable. Such materials include, without limitation, poly(α-hydroxy acid), polyhydroxybutyric acid, polycaprolactone, polyorthoester, polyanhydride, PACA, and polycyanoacrylate. Preferably, microparticles for use with the present invention are derived from a poly(α-hydroxy acid), in particular, from a poly(lactide) (“PLA”) or a copolymer of D,L-lactide and glycolide or glycolic acid, such as a poly(D,L-lactide-co-glycolide) (“PLG” or “PLGA”), or a copolymer of D,L-lactide and caprolactone. The microparticles may be derived from any of various polymeric starting materials which have a variety of molecular weights and, in the case of the copolymers such as PLG, a variety of lactide:glycolide ratios, the selection of which will be largely a matter of choice, depending in part on the coadministered macromolecule. These parameters are discussed more fully below.

[1377] Further antigens may also include an outer membrane vesicle (OMV) preparation.

[1378] Additional formulation methods and antigens (especially tumor antigens) are provided in U.S. patent Ser. No. 09/581,772.

[1379] Antigen References

[1380] The following references include antigens useful in conjunction with the compositions of the present invention:
[1381] 1 International patent application WO99/24578
[1382] 2 International patent application WO99/36544.
[1383] 3 International patent application WO99/57280.
[1384] 4 International patent application WO00/22430.
[1385] 5 Tettelin et al. (2000) Science 287:1809-1815.
[1386] 6 International patent application WO96/29412.
[1387] 7 Pizza et al. (2000) Science 287:1816-1820.
[1388] 8 PCT WO 01/52885.
[1389] 9Bjune et al. (1991) Lancet 338(8775).
[1390] 10 Fuskasawa et al. (1999) Vaccine 17:2951-2958.
[1391] 11 Rosenqist et al. (1998) Dev. Biol. Strand 92:323-333.
[1392] 12 Constantino et al. (1992) Vaccine 10:691-698.
[1393] 13 Constantino et al. (1999) Vaccine 17:1251-1263.
[1394] 14 Watson (2000) Pediatr Infect Dis J 19:331-332.
[1395] 15 Rubin (20000) Pediatr Clin North Am 47:269-285,v.
[1396] 16 Jedrzejas (2001) Microbiol Mol Biol Rev 65:187-207.
[1397] 17 International patent application filed on 3 Jul. 2001 claiming priority from GB-0016363.4;WO 02/02606; PCT IB/01/00166.
[1398] 18 Kalman et al. (1999) Nature Genetics 21:385-389.
[1399] 19 Read et al. (2000) Nucleic Acids Res 28:1397-406.
[1400] 20 Shirai et al. (2000) J. Infect. Dis 181(Suppl 3):S524-S527.
[1401] 21 International patent application WO99/27105.
[1402] 22 International patent application WO00/27994.
[1403] 23 International patent application WO00/37494.
[1404] 24 International patent application WO99/28475.
[1405] 25 Bell (2000) Pediatr Infect Dis J 19:1187-1188.
[1406] 26 Iwarson (1995) APMIS 103:321-326.
[1407] 27 Gerlich et al. (1990) Vaccine 8 Suppl:S63-68 & 79-80.
[1408] 28 Hsu et al. (1999) Clin Liver Dis 3:901-915.
[1409] 29 Gastofsson et al. (1996) N. Engl. J. Med. 334-:349-355.
[1410] 30 Rappuoli et al. (1991) TIBTECH 9:232-238.
[1411] 31 Vaccines (1988) eds. Plotkin & Mortimer. ISBN 0-7216-1946-0.
[1412] 32 Del Guidice et al. (1998) Molecular Aspects of Medicine 19:1-70.
[1413] 33 International patent application WO93/018150.
[1414] 34 International patent application WO99/53310.
[1415] 35 International patent application WO98/04702.
[1416] 36 Ross et al. (2001) Vaccine 19:135-142.
[1417] 37 Sutter et al. (2000) Pediatr Clin North Am 47:287-308.
[1418] 38 Zimmerman & Spann (1999) Am Fan Physician 59:113-118, 125-126.
[1419] 39 Dreensen (1997) Vaccine 15 Suppl“52-6.
[1420] 40 MMWR Morb Mortal Wkly rep 1998 Jan. 16: 47(1):12, 9.
[1421] 41 McMichael (2000) Vaccine19 Suppl 1:S101-107.
[1422] 42 Schuchat (1999) Lancer 353(9146):51-6.
[1423] 43 GB patent applications 0026333.5, 0028727.6 & 0105640.7.
[1424] 44 Dale (1999) Infect Disclin North Am 13:227-43, viii.
[1425] 45 Ferretti et al. (2001) PNAS USA 98: 4658-4663.
[1426] 46 Kuroda et al. (2001) Lancet 357(9264):1225-1240; see also pages 1218-1219.
[1427] 47 Ramsay et al. (2001) Lancet 357(9251):195-196.
[1428] 48 Lindberg (1999) Vaccine 17 Suppl 2:S28-36.
[1429] 49 Buttery & Moxon (2000) J R Coil Physicians Long 34:163-168.
[1430] 50 Ahmad & Chapnick (1999) Infect Dis Clin North Am 13:113-133, vii.
[1431] 51 Goldblatt (1998) J. Med. Microbiol. 47:663-567.
[1432] 52 European patent 0 477 508.
[1433] 53 U.S. Pat. No. 5,306,492.
[1434] 54 International patent application WO98/42721.
[1435] 55 Conjugate Vaccines (eds. Cruse et al.) ISBN 3805549326, particularly vol. 10:48-114.
[1436] 56 Hermanson (1996) Bioconjugate Techniques ISBN: 012323368 & 012342335X.
[1437] 57 European patent application 0372501.
[1438] 58 European patent application 0378881.
[1439] 59 European patent application 0427347.
[1440] 60 International patent application WO93/17712.
[1441] 61 International patent application WO98/58668.
[1442] 62 European patent application 0471177.
[1443] 63 International patent application WO00/56360.
[1444] 64 International patent application WO00/67161.

[1445] The contents of all of the above cited patents, patent applications and journal articles are incorporated by reference as if set forth fully herein.

[1446] There may be an upper limit to the number of Gram positive bacterial proteins which will be in the compositions of the invention. Preferably, the number of Gram positive bacterial proteins in a composition of the invention is less than 20, less than 19, less than 18, less than 17, less than 16, less than 15, less than 14, less than 13, less than 12, less than 11, less than 10, less than 9, less than 8, less than 7, less than 6, less than 5, less than 4, or less than 3. Still more preferably, the number of Gram positive bacterial proteins in a composition of the invention is less than 6, less than 5, or less than 4. Still more preferably, the number of Gram positive bacterial proteins in a composition of the invention is 3.

[1447] The Gram positive bacterial proteins and polynucleotides used in the invention are preferably isolated, i.e., separate and discrete, from the whole organism with which the molecule is found in nature or, when the polynucleotide or polypeptide is not found in nature, is sufficiently free of other biological macromolecules so that the polynucleotide or polypeptide can be used for its intended purpose.

### Fusion Proteins: GBS AI Sequences

[1448] The GBS AI proteins used in the invention may be present in the composition as individual separate polypeptides, but it is preferred that at least two (i.e. 2, 3, 4, 5, 6, 7, 8, 9, 10, 11, 12, 13, 14, 15, 16, 17, or 18) of the antigens are expressed as a single polypeptide chain (a “hybrid” or “fusion” polypeptide). Such fusion polypeptides offer two principal advantages: first, a polypeptide that may be unstable or poorly expressed on its own can be assisted by adding a suitable fusion partner that overcomes the problem; second, commercial manufacture is simplified as only one expression and purification need be employed in order to produce two polypeptides which are both antigenically useful.

[1449] The fusion polypeptide may comprise one or more AI polypeptide sequences. Preferably, the fusion comprises an AI surface protein sequence. Preferably, the fusion polypeptide includes one or more of GBS 80, GBS 104, and GBS 67. Most preferably, the fusion peptide includes a polypeptide sequence from GBS 80. Accordingly, the invention includes a fusion peptide comprising a first amino acid sequence and a second amino acid sequence, wherein said first and second amino acid sequences are selected from a GBS AI surface protein or a fragment thereof. Preferably, the first and second amino acid sequences in the fusion polypeptide comprise different epitopes.

[1450] Hybrids (or fusions) consisting of amino acid sequences from two, three, four, five, six, seven, eight, nine, or ten GBS antigens are preferred. In particular, hybrids consisting of amino acid sequences from two, three, four, or five GBS antigens are preferred.

[1451] Different hybrid polypeptides may be mixed together in a single formulation. Within such combinations, a GBS antigen may be present in more than one hybrid polypeptide and/or as a non-hybrid polypeptide. It is preferred, however, that an antigen is present either as a hybrid or as a non-hybrid, but not as both.

[1452] Hybrid polypeptides can be represented by the formula NH₂-A-{-X-L-}ₙ-B—COOH, wherein: X is an amino acid sequence of a GBS AI protein or a fragment thereof; L is an optional linker amino acid sequence; A is an optional N-terminal amino acid sequence; B is an optional C-terminal amino acid sequence; and n is 2, 3, 4, 5, 6, 7, 8, 9, 10, 11, 12, 13, 14 or 15.

[1453] If a —X— moiety has a leader peptide sequence in its wild-type form, this may be included or omitted in the hybrid protein. In some embodiments, the leader peptides will be deleted except for that of the —X— moiety located at the N-terminus of the hybrid protein i.e. the leader peptide of X₁ will be retained, but the leader peptides of X₂ . . . Xₙ will be omitted. This is equivalent to deleting all leader peptides and using the leader peptide of X₁ as moiety -A-.

[1454] For each n instances of {—X-L-}, linker amino acid sequence -L- may be present or absent. For instance, when n=2 the hybrid may be NH₂—X₁-L₁-X₂-L₂-COOH, NH₂—X₁—X₂—COOH, NH₂—X₁-L₁-X₂—COOH, NH₂—X₁-X₂-L₂-COOH, etc. Linker amino acid sequence(s) -L- will typically be short (e.g. 20 or fewer amino acids i.e. 19, 18, 17, 16, 15, 14, 13, 12, 11, 10, 9, 8, 7, 6, 5, 4, 3, 2, 1). Examples comprise short peptide sequences which facilitate cloning, poly-glycine linkers (i.e. comprising Glyₙ where n=2, 3, 4, 5, 6, 7, 8, 9, 10 or more), and histidine tags (i.e. Hisₙ where n=3, 4, 5, 6, 7, 8, 9, 10 or more). Other suitable linker amino acid sequences will be apparent to those skilled in the art. A useful linker is GSGGGG, with the Gly-Ser dipeptide being formed from a BamHI restriction site, thus aiding cloning and manipulation, and the (Gly)₄ tetrapeptide being a typical poly-glycine linker.

[1455] -A- is an optional N-terminal amino acid sequence. This will typically be short (e.g. 40 or fewer amino acids i.e. 39, 38, 37, 36, 35, 34, 33, 32, 31, 30, 29, 28, 27, 26, 25, 24, 23, 22, 21, 20, 19, 18, 17, 16, 15, 14, 13, 12, 11, 10, 9, 8, 7, 6, 5, 4, 3, 2, 1). Examples include leader sequences to direct protein trafficking, or short peptide sequences which facilitate cloning or purification (e.g. histidine tags i.e. Hisₙ where n=3, 4, 5, 6, 7, 8, 9, 10 or more). Other suitable N-terminal amino acid sequences will be apparent to those skilled in the art. If X₁ lacks its own N-terminus methionine, -A- is preferably an oligopeptide (e.g. with 1, 2, 3, 4, 5, 6, 7 or 8 amino acids) which provides a N-terminus methionine.

[1456] —B— is an optional C-terminal amino acid sequence. This will typically be short (e.g. 40 or fewer amino acids i.e. 39, 38, 37, 36, 35, 34, 33, 32, 31, 30, 29, 28, 27, 26, 25, 24, 23, 22, 21, 20, 19, 18, 17, 16, 15, 14, 13, 12, 11, 10, 9, 8, 7, 6, 5, 4, 3, 2, 1). Examples include sequences to direct protein trafficking, short peptide sequences which facilitate cloning or purification (e.g. comprising histidine tags i.e. Hisₙ where n=3, 4, 5, 6, 7, 8, 9, 10 or more), or sequences which enhance protein stability. Other suitable C-terminal amino acid sequences will be apparent to those skilled in the art.

[1457] Most preferably, n is 2 or 3.

[1458] In some embodiment the GBS hybrid proteins of the invention may comprise first —X— moiety (—Xₐ—) and a second —X— moiety (—X_{b}—). The —Xₐ— moiety has one of the following amino acid sequences: SEQ ID NO:16, SEQ ID NO:126, SEQ ID NO:2, SEQ ID NO:11, SEQ ID NO:21, SEQ ID NO:27, SEQ ID NO:33, SEQ ID NO:35, SEQ ID NO:36.

[1459] The —X_{b}— moiety is related to —Xₐ— such that: (i) —X_{b}— has sequence identity to —Xₐ—, and/or (j) —X_{b}— comprises a fragment of —Xₐ—. Examples of this second type of hybrid protein include proteins in which two or more —X— moieties are identical, or in which they are variants of the same protein e.g. two polymorphic forms may be expressed as —Xₐ—X_{b}—, and three polymorphic forms may be expressed as —Xₐ—X_{b}—X_{c}— etc. The —Xa- and —Xb- moieties may be in either order from N-terminus to C-terminus.

[1460] The degree of ‘sequence identity’ referred to in (i) is preferably greater than 50% (ea. 60%, 70%, 80%, 90%, 95%, 99% or more, up to 100%). This includes mutants, homologs, orthologs, allelic variants etc. Identity is preferably determined by the Smith-Waterman homology search algorithm as implemented in the MPSRCH program (Oxford Molecular), using an 30 affine gap search with parameters gap open penalty=12 and gap extension penalty=1;. Typically, 50% identity or more between two proteins is considered as an indication of functional equivalence.

[1461] The ‘fragment’ referred to in (j) should consist of least m consecutive amino acids from an amino acid sequence from SEQ ID NO:16, SEQ ID NO:126, SEQ ID NO:2, SEQ ID NO:11, SEQ ID NO:21, SEQ ID NO:27, SEQ ID NO:33, SEQ ID NO:35, SEQ ID NO:36. and, depending on the particular sequence, m is 7 or more (ea. 8, 10,&rsqb;2, 14, 16, 18, 20, 25, 30, 35, 40, 50, 60, 70, 80, 90, 100, 150, 200 or more). Preferably the fragment comprises an epitope from an amino acid sequence from SEQ ID NO:16, SEQ ID NO:126, SEQ ID NO:2, SEQ ID NO:11, SEQ ID NO:21, SEQ ID NO:27, SEQ ID NO:33, SEQ ID NO:35, SEQ ID NO:36.

### Fusion Proteins: Gram Positive Bacteria AI Sequences

[1462] The Gram positive bacteria AI proteins used in the invention may be present in the composition as individual separate polypeptides, but it is preferred that at least two (i.e. 2, 3, 4, 5, 6, 7, 8, 9, 10, 11, 12, 13, 14, 15, 16, 17, or 18) of the antigens are expressed as a single polypeptide chain (a “hybrid” or “fusion” polypeptide). Such fusion polypeptides offer two principal advantages: first, a polypeptide that may be unstable or poorly expressed on its own can be assisted by adding a suitable fusion partner that overcomes the problem; second, commercial manufacture is simplified as only one expression and purification need be employed in order to produce two polypeptides which are both antigenically useful.

[1463] The fusion polypeptide may comprise one or more AI polypeptide sequences. Preferably, the fusion comprises an AI surface protein sequence. Accordingly, the invention includes a fusion peptide comprising a first amino acid sequence and a second amino acid sequence, wherein said first and second amino acid sequences are selected from a Gram positive bacteria AI protein or a fragment thereof. Preferably, the first and second amino acid sequences in the fusion polypeptide comprise different epitopes.

[1464] Hybrids (or fusions) consisting of amino acid sequences from two, three, four, five, six, seven, eight, nine, or ten Gram positive bacteria antigens are preferred. In particular, hybrids consisting of amino acid sequences from two, three, four, or five Gram positive bacteria antigens are preferred.

[1465] Different hybrid polypeptides may be mixed together in a single formulation. Within such combinations, a Gram positive bacteria AI sequence may be present in more than one hybrid polypeptide and/or as a non-hybrid polypeptide. It is preferred, however, that an antigen is present either as a hybrid or as a non-hybrid, but not as both.

[1466] Hybrid polypeptides can be represented by the formula NH₂-A-{-X-L-}ₙ-B—COOH, wherein: X is an amino acid sequence of a Gram positive bacteria AI sequence or a fragment thereof; L is an optional linker amino acid sequence; A is an optional N-terminal amino acid sequence; B is an optional C-terminal amino acid sequence; and n is 2, 3, 4, 5, 6, 7, 8, 9, 10, 11, 12, 13, 14 or 15.

[1467] If a —X— moiety has a leader peptide sequence in its wild-type form, this may be included or omitted in the hybrid protein. In some embodiments, the leader peptides will be deleted except for that of the —X— moiety located at the N-terminus of the hybrid protein i.e. the leader peptide of X₁ will be retained, but the leader peptides of X₂ . . . Xₙ will be omitted. This is equivalent to deleting all leader peptides and using the leader peptide of X₁ as moiety -A-.

[1468] For each n instances of {—X-L-}, linker amino acid sequence -L- may be present or absent. For instance, when n=2 the hybrid may be NH₂—X₁-L₁-X₂-L₂-COOH, NH₂—X₁—X₂—COOH, NH₂—X₁-L₁-X₂—COOH, NH₂—X₁—X₂-L₂-COOH, etc. Linker amino acid sequence(s) -L- will typically be short (e.g. 20 or fewer amino acids i.e. 19, 18, 17, 16, 15, 14, 13, 12, 11, 10, 9, 8, 7, 6, 5, 4, 3, 2, 1). Examples comprise short peptide sequences which facilitate cloning, poly-glycine linkers (i.e. comprising Glyₙ where n=2, 3, 4, 5, 6, 7, 8, 9, 10 or more), and histidine tags (i.e. Hisₙ where n=3, 4, 5, 6, 7, 8, 9, 10 or more). Other suitable linker amino acid sequences will be apparent to those skilled in the art. A useful linker is GSGGGG, with the Gly-Ser dipeptide being formed from a BamHI restriction site, thus aiding cloning and manipulation, and the (Gly)₄ tetrapeptide being a typical poly-glycine linker.

[1469] -A- is an optional N-terminal amino acid sequence. This will typically be short (e.g. 40 or fewer amino acids i.e. 39, 38, 37, 36, 35, 34, 33, 32, 31, 30, 29, 28, 27, 26, 25, 24, 23, 22, 21, 20, 19, 18, 17, 16, 15, 14, 13, 12, 11, 10, 9, 8, 7, 6, 5, 4, 3, 2, 1). Examples include leader sequences to direct protein trafficking, or short peptide sequences which facilitate cloning or purification (e.g. histidine tags i.e. Hisₙ where n=3, 4, 5, 6, 7, 8, 9, 10 or more). Other suitable N-terminal amino acid sequences will be apparent to those skilled in the art. If X₁ lacks its own N-terminus methionine, -A- is preferably an oligopeptide (e.g. with 1, 2, 3, 4, 5, 6, 7 or 8 amino acids) which provides a N-terminus methionine.

[1470] —B— is an optional C-terminal amino acid sequence. This will typically be short (e.g. 40 or fewer amino acids i.e. 39, 38, 37, 36, 35, 34, 33, 32, 31, 30, 29, 28, 27, 26, 25, 24, 23, 22, 21, 20, 19, 18, 17, 16, 15, 14, 13, 12, 11, 10, 9, 8, 7, 6, 5, 4, 3, 2, 1). Examples include sequences to direct protein trafficking, short peptide sequences which facilitate cloning or purification (e.g. comprising histidine tags i.e. Hisₙ where n=3, 4, 5, 6, 7, 8, 9, 10 or more), or sequences which enhance protein stability. Other suitable C-terminal amino acid sequences will be apparent to those skilled in the art.

[1471] Most preferably, n is 2 or 3.

### Antibodies: GBS AI Sequences

[1472] The GBS AI proteins of the invention may also be used to prepare antibodies specific to the GBS AI proteins. The antibodies are preferably specific to the an oligomeric or hyper-oligomeric form of an AI protein. The invention also includes combinations of antibodies specific to GBS AI proteins selected to provide protection against an increased range of GBS serotypes and strain isolates. For example, a combination may comprise a first and second antibody, wherein said first antibody is specific to a first GBS AI protein and said second antibody is specific to a second GBS AI protein. Preferably, the nucleic acid sequence encoding said first GBS AI protein is not present in a GBS genome comprising a polynucleotide sequence encoding for said second GBS AI protein. Preferably, the nucleic acid sequence encoding said first and second GBS AI proteins are present in the genomes of multiple GBS serotypes and strain isolates.

[1473] The GBS specific antibodies of the invention include one or more biological moieties that, through chemical or physical means, can bind to or associate with an epitope of a GBS polypeptide. The antibodies of the invention include antibodies which specifically bind to a GBS AI protein. The invention includes antibodies obtained from both polyclonal and monoclonal preparations, as well as the following: hybrid (chimeric) antibody molecules (see, for example, Winter et al. (1991) Nature 349: 293-299; and U.S. Pat. No. 4,816,567; F(ab′)₂ and F(ab) fragments; Fᵥ molecules (non-covalent heterodimers, see, for example, Inbar et al. (1972) Proc Natl Acad Sci USA 69:2659-2662; and Ehrlich et al. (1980) Biochem 19:4091-4096); single-chain Fv molecules (sFv) (see, for example, Huston et al. (1988) Proc Natl Acad Sci USA 85:5897-5883); dimeric and trimeric antibody fragment constructs; minibodies (see, e.g., Pack et al. (1992) Biochem 31:1579-1584; Cumber et al. (1992) J Immunology 149B: 120-126); humanized antibody molecules (see, for example, Riechmann et al. (1988) Nature 332:323-327; Verhoeyan et al. (1988) Science 239:1534-1536; and U.K. Patent Publication No. GB 2,276,169, published 21 Sep. 1994); and, any functional fragments obtained from such molecules, wherein such fragments retain immunological binding properties of the parent antibody molecule. The invention further includes antibodies obtained through non-conventional processes, such as phage display.

[1474] Preferably, the GBS specific antibodies of the invention are monoclonal antibodies. Monoclonal antibodies of the invention include an antibody composition having a homogeneous antibody population. Monoclonal antibodies of the invention may be obtained from murine hybridomas, as well as human monoclonal antibodies obtained using human rather than murine hybridomas. See, e.g., Cote, et al. Monoclonal Antibodies and Cancer Therapy, Alan R. Liss, 1985, p 77.

[1475] The antibodies of the invention may be used in diagnostic applications, for example, to detect the presence or absence of GBS in a biological sample. The antibodies of the invention may also be used in the prophylactic or therapeutic treatment of GBS infection.

### Antibodies: Gram Positive Bacteria AI Sequences

[1476] The Gram positive bacteria AI proteins of the invention may also be used to prepare antibodies specific to the Gram positive bacteria AI proteins. The antibodies are preferably specific to the an oligomeric or hyper-oligomeric form of an AI protein. The invention also includes combinations of antibodies specific to Gram positive bacteria AI proteins selected to provide protection against an increased range of Gram positive bacteria genus, species, serotypes and strain isolates.

[1477] For example, a combination may comprise a first and second antibody, wherein said first antibody is specific to a first Gram positive bacteria AI protein and said second antibody is specific to a second Gram positive bacteria AI protein. Preferably, the nucleic acid sequence encoding said first Gram positive bacteria AI protein is not present in a Gram positive bacterial genome comprising a polynucleotide sequence encoding for said second Gram positive bacteria AI protein. Preferably, the nucleic acid sequence encoding said first and second Gram positive bacteria AI proteins are present in the genomes of multiple Gram positive bacteria genus, species, serotypes or strain isolates.

[1478] As an example of an instance where the combination of antibodies provides protection against an increased range of bacteria serotypes, the first antibody may be specific to a first GAS AI protein and the second antibody may be specific to a second GAS AI protein. The first GAS AI protein may comprise a GAS AI-1 surface protein, while the second GAS AI protein may comprise a GAS AI-2 or AI-3 surface protein.

[1479] As an example of an instance where the combination of antibodies provides protection against an increased range of bacterial species, the first antibody may be specific to a GBS AI protein and the second antibody may be specific to a GAS AI protein. Alternatively, the first antibody may be specific to a GAS AI protein and the second antibody may be specific to a S. pneumoniae AI protein.

[1480] The Gram positive specific antibodies of the invention include one or more biological moieties that, through chemical or physical means, can bind to or associate with an epitope of a Gram positive bacteria AI polypeptide. The antibodies of the invention include antibodies which specifically bind to a Gram positive bacteria AI protein. The invention includes antibodies obtained from both polyclonal and monoclonal preparations, as well as the following: hybrid (chimeric) antibody molecules (see, for example, Winter et al. (1991) Nature 349: 293-299; and U.S. Pat. No. 4,816,567; F(ab′)₂ and F(ab) fragments; Fᵥ molecules (non-covalent heterodimers, see, for example, Inbar et al. (1972) Proc Natl Acad Sci USA 69:2659-2662; and Ehrlich et al. (1980) Biochem 19:4091-4096); single-chain Fv molecules (sFv) (see, for example, Huston et al. (1988) Proc Natl Acad Sci USA 85:5897-5883); dimeric and trimeric antibody fragment constructs; minibodies (see, e.g., Pack et al. (1992) Biochem 31:1579-1584; Cumber et al. (1992) J Immunology 149B: 120-126); humanized antibody molecules (see, for example, Riechmann et al. (1988) Nature 332:323-327; Verhoeyan et al. (1988) Science 239:1534-1536; and U.K. Patent Publication No. GB 2,276,169, published 21 Sep. 1994); and, any functional fragments obtained from such molecules, wherein such fragments retain immunological binding properties of the parent antibody molecule. The invention further includes antibodies obtained through non-conventional processes, such as phage display.

[1481] Preferably, the Gram positive specific antibodies of the invention are monoclonal antibodies. Monoclonal antibodies of the invention include an antibody composition having a homogeneous antibody population. Monoclonal antibodies of the invention may be obtained from murine hybridomas, as well as human monoclonal antibodies obtained using human rather than murine hybridomas. See, e.g., Cote, et al. Monoclonal Antibodies and Cancer Therapy, Alan R. Liss, 1985, p 77.

[1482] The antibodies of the invention may be used in diagnostic applications, for example, to detect the presence or absence of Gram positive bacteria in a biological sample. The antibodies of the invention may also be used in the prophylactic or therapeutic treatment of Gram positive bacteria infection.

### Nucleic Acids

[1483] The invention provides nucleic acids encoding the Gram positive bacteria sequences and/or the hybrid fusion polypeptides of the invention. The invention also provides nucleic acid encoding the GBS antigens and/or the hybrid fusion polypeptides of the invention. Furthermore, the invention provides nucleic acid which can hybridise to these nucleic acids, preferably under “high stringency” conditions (e.g. 65° C. in a 0.1×SSC, 0.5% SDS solution).

[1484] Polypeptides of the invention can be prepared by various means (e.g. recombinant expression, purification from cell culture, chemical synthesis, etc.) and in various forms (e.g. native, fusions, non-glycosylated, lipidated, etc.). They are preferably prepared in substantially pure form (i.e. substantially free from other GAS or host cell proteins).

[1485] Nucleic acid according to the invention can be prepared in many ways (e.g. by chemical synthesis, from genomic or cDNA libraries, from the organism itself, etc.) and can take various forms (e.g. single stranded, double stranded, vectors, probes, etc.). They are preferably prepared in substantially pure form (i.e. substantially free from other GBS or host cell nucleic acids).

[1486] The term “nucleic acid” includes DNA and RNA, and also their analogues, such as those containing modified backbones (e.g. phosphorothioates, etc.), and also peptide nucleic acids (PNA), etc. The invention includes nucleic acid comprising sequences complementary to those described above (e.g. for antisense or probing purposes).

[1487] The invention also provides a process for producing a polypeptide of the invention, comprising the step of culturing a host cell transformed with nucleic acid of the invention under conditions which induce polypeptide expression.

[1488] The invention provides a process for producing a polypeptide of the invention, comprising the step of synthesising at least part of the polypeptide by chemical means.

[1489] The invention provides a process for producing nucleic acid of the invention, comprising the step of amplifying nucleic acid using a primer-based amplification method (e.g. PCR).

[1490] The invention provides a process for producing nucleic acid of the invention, comprising the step of synthesising at least part of the nucleic acid by chemical means.

### Purification and Recombinant Expression

[1491] The Gram positive bacteria AI proteins of the invention may be isolated from the native Gram positive bacteria, or they may be recombinantly produced, for instance in a heterologous host. For example, the GAS, GBS, and S. pneumoniae antigens of the invention may be isolated from Streptococcus agalactiae, S. pyogenes, S. pneumoniae, or they may be recombinantly produced, for instance, in a heterologous host. Preferably, the GBS antigens are prepared using a heterologous host.

[1492] The heterologous host may be prokaryotic (e.g. a bacterium) or eukaryotic. It is preferably E. coli, but other suitable hosts include Bacillus subtilis, Vibrio cholerae, Salmonella typhi, Salmonella typhimurium, Neisseria lactamica, Neisseria cinerea, Mycobacteria (e.g. M. tuberculosis), S. gordonii, L. lactis, yeasts, etc.

[1493] Recombinant production of polypeptides is facilitated by adding a tag protein to the Gram positive bacteria AI sequence to be expressed as a fusion protein comprising the tag protein and the Gram positive bacteria antigen. For example, recombinant production of polypeptides is facilitated by adding a tag protein to the GBS antigen to be expressed as a fusion protein comprising the tag protein and the GBS antigen. Such tag proteins can facilitate purification, detection and stability of the expressed protein. Tag proteins suitable for use in the invention include a polyarginine tag (Arg-tag), polyhistidine tag (His-tag), FLAG-tag, Strep-tag, c-myc-tag, S-tag, calmodulin-binding peptide, cellulose-binding domain, SBP-tag, chitin-binding domain, glutathione S-transferase-tag (GST), maltose-binding protein, transcription termination anti-termination factor (NusA), E. coli thioredoxin (TrxA) and protein disulfide isomerase I (DsbA). Preferred tag proteins include His-tag and GST. A full discussion on the use of tag proteins can be found at Terpe et al., “Overview of tag protein fusions: from molecular and biochemical fundamentals to commercial systems,” Appl Microbiol Biotechnol (2003) 60:523-533.

[1494] After purification, the tag proteins may optionally be removed from the expressed fusion protein, i.e., by specifically tailored enzymatic treatments known in the art. Commonly used proteases include enterokinase, tobacco etch virus (TEV), thrombin, and factor Xₐ.

GBS polysaccharides

[1495] The compositions of the invention may be further improved by including GBS polysaccharides. Preferably, the GBS antigen and the saccharide each contribute to the immunological response in a recipient. The combination is particularly advantageous where the saccharide and polypeptide provide protection from different GBS serotypes.

[1496] The combined antigens may be present as a simple combination where separate saccharide and polypeptide antigens are administered together, or they may be present as a conjugated combination, where the saccharide and polypeptide antigens are covalently linked to each other.

[1497] Thus the invention provides an immunogenic composition comprising (i) one or more GBS AI proteins and (ii) one or more GBS saccharide antigens. The polypeptide and the polysaccharide may advantageously be covalently linked to each other to form a conjugate.

[1498] Between them, the combined polypeptide and saccharide antigens preferably cover (or provide protection from) two or more GBS serotypes (e.g. 2, 3, 4, 5, 6, 7, 8 or more serotypes). The serotypes of the polypeptide and saccharide antigens may or may not overlap. For example, the polypeptide might protect against serogroup II or V, while the saccharide protects against either serogroups Ia, Ib, or III. Preferred combinations protect against the following groups of serotypes: (1) serotypes Ia and Ib, (2) serotypes Ia and II, (3) serotypes Ia and III, (4) serotypes Ia and IV, (5) serotypes Ia and V, (6) serotypes Ia and VI, (7) serotypes Ia and VII, (8) serotypes Ia and VIII, (9) serotypes Ib and II, (10) serotypes Ib and III, (11) serotypes Ib and IV, (12) serotypes Ib and V, (13) serotypes Ib and VI, (14) serotypes Ib and VII, (15) serotypes Ib and VIII, 16) serotypes II and III, (17) serotypes II and IV, (18) serotypes II and V, (19) serotypes II and VI, (20) serotypes II and VII, (21) serotypes II and VII, (22) serotypes III and IV, (23) serotypes III and V, (24) serotypes III and VI, (25) serotypes III and VII, (26) serotypes III and VIII, (27) serotypes IV and V, (28) serotypes IV and VI, (29) serotypes IV and VII, (30) serotypes IV and VIII, (31) serotypes V and VI, (32) serotypes V and VII, (33) serotypes V and VIII, (34) serotypes VI and VII, (35) serotypes VI and VIII, and (36) serotypes VII and VIII.

[1499] Still more preferably, the combinations protect against the following groups of serotypes: (1) serotypes Ia and II, (2) serotypes Ia and V, (3) serotypes Ib and II, (4) serotypes Ib and V, (5) serotypes III and II, and (6) serotypes III and V. Most preferably, the combinations protect against serotypes III and V.

[1500] Protection against serotypes II and V is preferably provided by polypeptide antigens. Protection against serotypes Ia, Ib and/or III may be polypeptide or saccharide antigens.

### Immunogenic Compositions and Medicaments

[1501] Compositions of the invention are preferably immunogenic compositions, and are more preferably vaccine compositions. The pH of the composition is preferably between 6 and 8, preferably about 7. The pH may be maintained by the use of a buffer. The composition may be sterile and/or pyrogen-free. The composition may be isotonic with respect to humans.

[1502] Vaccines according to the invention may either be prophylactic (i.e. to prevent infection) or therapeutic (i.e. to treat infection), but will typically be prophylactic. Accordingly, the invention includes a method for the therapeutic or prophylactic treatment of a Gram positive bacteria infection in an animal susceptible to such gram positive bacterial infection comprising administering to said animal a therapeutic or prophylactic amount of the immunogenic composition of the invention. For example, the invention includes a method for the therapeutic or prophylactic treatment of a Streptococcus agalactiae, S. pyogenes, or S. pneumoniae infection in an animal susceptible to streptococcal infection comprising administering to said animal a therapeutic or prophylactic amount of the immunogenic compositions of the invention.

[1503] The invention also provides a composition of the invention for use of the compositions described herein as a medicament. The medicament is preferably able to raise an immune response in a mammal (i.e. it is an immunogenic composition) and is more preferably a vaccine.

[1504] The invention also provides the use of the compositions of the invention in the manufacture of a medicament for raising an immune response in a mammal The medicament is preferably a vaccine.

[1505] The invention also provides kits comprising one or more containers of compositions of the invention. Compositions can be in liquid form or can be lyophilized, as can individual antigens. Suitable containers for the compositions include, for example, bottles, vials, syringes, and test tubes. Containers can be formed from a variety of materials, including glass or plastic. A container may have a sterile access port (for example, the container may be an intravenous solution bag or a vial having a stopper pierceable by a hypodermic injection needle). The composition may comprise a first component comprising one or more Gram positive bacteria AI proteins. Preferably, the AI proteins are surface AI proteins. Preferably, the AI surface proteins are in an oligomeric or hyperoligomeric form. For example, the first component comprises a combination of GBS antigens or GAS antigens, or S. pneumoniae antigens. Preferably said combination includes GBS 80. Preferably GBS 80 is present in an oligomeric or hyperoligomeric form.

[1506] The kit can further comprise a second container comprising a pharmaceutically-acceptable buffer, such as phosphate-buffered saline, Ringer's solution, or dextrose solution. It can also contain other materials useful to the end-user, including other buffers, diluents, filters, needles, and syringes. The kit can also comprise a second or third container with another active agent, for example an antibiotic.

[1507] The kit can also comprise a package insert containing written instructions for methods of inducing immunity against S agalactiae and or S. pyogenes and/or S pneumoniae or for treating S agalactiae and or S. pyogenes and/or S pneumoniae infections. The package insert can be an unapproved draft package insert or can be a package insert approved by the Food and Drug Administration (FDA) or other regulatory body.

[1508] The invention also provides a delivery device pre-filled with the immunogenic compositions of the invention.

[1509] The invention also provides a method for raising an immune response in a mammal comprising the step of administering an effective amount of a composition of the invention. The immune response is preferably protective and preferably involves antibodies and/or cell-mediated immunity This immune response will preferably induce long lasting (e.g., neutralising) antibodies and a cell mediated immunity that can quickly respond upon exposure to one or more GBS and/or GAS and/or S. pneumoniae antigens. The method may raise a booster response.

[1510] The invention provides a method of neutralizing GBS, GAS, or S. pneumoniae infection in a mammal comprising the step of administering to the mammal an effective amount of the immunogenic compositions of the invention, a vaccine of the invention, or antibodies which recognize an immunogenic composition of the invention.

[1511] The mammal is preferably a human. Where the vaccine is for prophylactic use, the human is preferably a female (either of child bearing age or a teenager). Alternatively, the human may be elderly (e.g., over the age of 50, 55, 60, 65, 70 or 75) and may have an underlying disease such as diabetes or cancer. Where the vaccine is for therapeutic use, the human is preferably a pregnant female or an elderly adult.

[1512] These uses and methods are preferably for the prevention and/or treatment of a disease caused by Streptococcus agalactiae, or S. pyogenes, or S. pneumoniae. The compositions may also be effective against other streptococcal bacteria. The compositions may also be effective against other Gram positive bacteria.

[1513] One way of checking efficacy of therapeutic treatment involves monitoring Gram positive bacterial infection after administration of the composition of the invention. One way of checking efficacy of prophylactic treatment involves monitoring immune responses against the Gram positive bacterial antigens in the compositions of the invention after administration of the composition.

[1514] One way of checking efficacy of therapeutic treatment involves monitoring GBS infection after administration of the composition of the invention. One way of checking efficacy of prophylactic treatment involves monitoring immune responses against the GBS antigens in the compositions of the invention after administration of the composition.

[1515] A way of assessing the immunogenicity of the component proteins of the immunogenic compositions of the present invention is to express the proteins recombinantly and to screen patient sera or mucosal secretions by immunoblot. A positive reaction between the protein and the patient serum indicates that the patient has previously mounted an immune response to the protein in question—that is, the protein is an immunogen. This method may also be used to identify immunodominant proteins and/or epitopes.

[1516] Another way of checking efficacy of therapeutic treatment involves monitoring GBS or GAS or S pneumoniae infection after administration of the compositions of the invention. One way of checking efficacy of prophylactic treatment involves monitoring immune responses both systemically (such as monitoring the level of IgG1 and IgG2a production) and mucosally (such as monitoring the level of IgA production) against the GBS and/or GAS and/or S pneumoniae antigens in the compositions of the invention after administration of the composition. Typically, GBS and/or GAS and/or S pneumoniae serum specific antibody responses are determined post-immunization but pre-challenge whereas mucosal GBS and/or GAS and/or S pneumoniae specific antibody body responses are determined post-immunization and post-challenge.

[1517] The vaccine compositions of the present invention can be evaluated in in vitro and in vivo animal models prior to host, e.g., human, administration.

[1518] The efficacy of immunogenic compositions of the invention can also be determined in vivo by challenging animal models of GBS and/or GAS and/or S pneumoniae infection, e.g., guinea pigs or mice, with the immunogenic compositions. The immunogenic compositions may or may not be derived from the same serotypes as the challenge serotypes. Preferably the immunogenic compositions are derivable from the same serotypes as the challenge serotypes. More preferably, the immunogenic composition and/or the challenge serotypes are derivable from the group of GBS and/or GAS and/or S pneumoniae serotypes.

[1519] In vivo efficacy models include but are not limited to: (i) A murine infection model using human GBS and/or GAS and/or S pneumoniae serotypes; (ii) a murine disease model which is a murine model using a mouse-adapted GBS and/or GAS and/or S pneumoniae strain, such as those strains outlined above which is particularly virulent in mice and (iii) a primate model using human GBS or GAS or S pneumoniae isolates.

[1520] The immune response may be one or both of a TH1 immune response and a TH2 response.

[1521] The immune response may be an improved or an enhanced or an altered immune response.

[1522] The immune response may be one or both of a systemic and a mucosal immune response.

[1523] Preferably the immune response is an enhanced system and/or mucosal response.

[1524] An enhanced systemic and/or mucosal immunity is reflected in an enhanced TH1 and/or TH2 immune response. Preferably, the enhanced immune response includes an increase in the production of IgG1 and/or IgG2a and/or IgA

[1525] Preferably the mucosal immune response is a TH2 immune response. Preferably, the mucosal immune response includes an increase in the production of IgA.

[1526] Activated TH2 cells enhance antibody production and are therefore of value in responding to extracellular infections. Activated TH2 cells may secrete one or more of IL-4, IL-5, IL-6, and IL-10. A TH2 immune response may result in the production of IgG1, IgE, IgA and memory B cells for future protection.

[1527] A TH2 immune response may include one or more of an increase in one or more of the cytokines associated with a TH2 immune response (such as IL-4, IL-5, IL-6 and IL-10), or an increase in the production of IgG1, IgE, IgA and memory B cells. Preferably, the enhanced TH2 immune response will include an increase in IgG1 production.

[1528] A TH1 immune response may include one or more of an increase in CTLs, an increase in one or more of the cytokines associated with a TH1 immune response (such as IL-2, IFN-γ, and TNFβ), an increase in activated macrophages, an increase in NK activity, or an increase in the production of IgG2a. Preferably, the enhanced TH1 immune response will include an increase in IgG2a production.

[1529] Immunogenic compositions of the invention, in particular, immunogenic composition comprising one or more GAS antigens of the present invention may be used either alone or in combination with other GAS antigens optionally with an immunoregulatory agent capable of eliciting a Th1 and/or Th2 response.

[1530] Compositions of the invention will generally be administered directly to a patient. Certain routes may be favored for certain compositions, as resulting in the generation of a more effective immune response, preferably a CMI response, or as being less likely to induce side effects, or as being easier for administration. Direct delivery may be accomplished by parenteral injection (e.g. subcutaneously, intraperitoneally, intradermally, intravenously, intramuscularly, or to the interstitial space of a tissue), or by rectal, oral (e.g. tablet, spray), vaginal, topical, transdermal (e.g. see WO 99/27961) or transcutaneous (e.g. see WO 02/074244 and WO 02/064162), intranasal (e.g. see WO03/028760), ocular, aural, pulmonary or other mucosal administration.

[1531] The invention may be used to elicit systemic and/or mucosal immunity

[1532] In one particularly preferred embodiment, the immunogenic composition comprises one or more GBS or GAS or S pneumoniae antigen(s) which elicits a neutralising antibody response and one or more GBS or GAS or S pneumoniae antigen(s) which elicit a cell mediated immune response. In this way, the neutralising antibody response prevents or inhibits an initial GBS or GAS or S pneumoniae infection while the cell-mediated immune response capable of eliciting an enhanced Th1 cellular response prevents further spreading of the GBS or GAS or S pneumoniae infection. Preferably, the immunogenic composition comprises one or more GBS or GAS or S pneumoniae surface antigens and one or more GBS or GAS or S pneumoniae cytoplasmic antigens. Preferably the immunogenic composition comprises one or more GBS or GAS or S pneumoniae surface antigens or the like and one or other antigens, such as a cytoplasmic antigen capable of eliciting a Th1 cellular response.

[1533] Dosage treatment can be a single dose schedule or a multiple dose schedule. Multiple doses may be used in a primary immunisation schedule and/or in a booster immunisation schedule. In a multiple dose schedule the various doses may be given by the same or different routes e.g. a parenteral prime and mucosal boost, a mucosal prime and parenteral boost, etc.

[1534] The compositions of the invention may be prepared in various forms. For example, the compositions may be prepared as injectables, either as liquid solutions or suspensions. Solid forms suitable for solution in, or suspension in, liquid vehicles prior to injection can also be prepared (e.g. a lyophilised composition). The composition may be prepared for topical administration e.g. as an ointment, cream or powder. The composition may be prepared for oral administration e.g. as a tablet or capsule, as a spray, or as a syrup (optionally flavoured). The composition may be prepared for pulmonary administration e.g. as an inhaler, using a fine powder or a spray. The composition may be prepared as a suppository or pessary. The composition may be prepared for nasal, aural or ocular administration e.g. as drops. The composition may be in kit form, designed such that a combined composition is reconstituted just prior to administration to a patient. Such kits may comprise one or more antigens in liquid form and one or more lyophilised antigens.

[1535] Immunogenic compositions used as vaccines comprise an immunologically effective amount of antigen(s), as well as any other components, such as antibiotics, as needed. By ‘immunologically effective amount,’ it is meant that the administration of that amount to an individual, either in a single dose or as part of a series, is effective for treatment or prevention, or increases a measurable immune response or prevents or reduces a clinical symptom. This amount varies depending upon the health and physical condition of the individual to be treated, age, the taxonomic group of individual to be treated (e.g. non-human primate, primate, etc.), the capacity of the individual's immune system to synthesise antibodies, the degree of protection desired, the formulation of the vaccine, the treating doctor's assessment of the medical situation, and other relevant factors. It is expected that the amount will fall in a relatively broad range that can be determined through routine trials.

### Further Components of the Composition

[1536] The composition of the invention will typically, in addition to the components mentioned above, comprise one or more ‘pharmaceutically acceptable carriers,’ which include any carrier that does not itself induce the production of antibodies harmful to the individual receiving the composition. Suitable carriers are typically large, slowly metabolised macromolecules such as proteins, polysaccharides, polylactic acids, polyglycolic acids, polymeric amino acids, amino acid copolymers, and lipid aggregates (such as oil droplets or liposomes). Such carriers are well known to those of ordinary skill in the art. The vaccines may also contain diluents, such as water, saline, glycerol, etc. Additionally, auxiliary substances, such as wetting or emulsifying agents, pH buffering substances, and the like, may be present. A thorough discussion of pharmaceutically acceptable excipients is available in Gennaro (2000) Remington: The Science and Practice of Pharmacy. 20th ed., ISBN: 0683306472.

### Adjuvants

[1537] Vaccines of the invention may be administered in conjunction with other immunoregulatory agents. In particular, compositions will usually include an adjuvant. Adjuvants for use with the invention include, but are not limited to, one or more of the following set forth below:

[1538] A. Mineral Containing Compositions

[1539] Mineral containing compositions suitable for use as adjuvants in the invention include mineral salts, such as aluminum salts and calcium salts. The invention includes mineral salts such as hydroxides (e.g. oxyhydroxides), phosphates (e.g. hydroxyphosphates, orthophosphates), sulfates, etc. (e.g. see chapters 8 & 9 of Vaccine Design . . . (1995) eds. Powell & Newman. ISBN: 030644867X. Plenum.), or mixtures of different mineral compounds (e.g. a mixture of a phosphate and a hydroxide adjuvant, optionally with an excess of the phosphate), with the compounds taking any suitable form (e.g. gel, crystalline, amorphous, etc.), and with adsorption to the salt(s) being preferred. The mineral containing compositions may also be formulated as a particle of metal salt (WO 00/23105).

[1540] Aluminum salts may be included in vaccines of the invention such that the dose of Al³⁺ is between 0.2 and 1.0 mg per dose.

[1541] B. Oil-Emulsions

[1542] Oil-emulsion compositions suitable for use as adjuvants in the invention include squalene-water emulsions, such as MF59 (5% Squalene, 0.5% Tween 80, and 0.5% Span 85, formulated into submicron particles using a microfluidizer). See WO90/14837. See also, Podda, “The adjuvanted influenza vaccines with novel adjuvants: experience with the MF59-adjuvanted vaccine,” Vaccine (2001) 19: 2673-2680; Frey et al., “Comparison of the safety, tolerability, and immunogenicity of a MF59-adjuvanted influenza vaccine and a non-adjuvanted influenza vaccine in non-elderly adults,” Vaccine (2003) 21:4234-4237. MF59 is used as the adjuvant in the FLUAD™ influenza virus trivalent subunit vaccine.

[1543] Particularly preferred adjuvants for use in the compositions are submicron oil-in-water emulsions. Preferred submicron oil-in-water emulsions for use herein are squalene/water emulsions optionally containing varying amounts of MTP-PE, such as a submicron oil-in-water emulsion containing 4-5% w/v squalene, 0.25-1.0% w/v Tween 80™ (polyoxyelthylenesorbitan monooleate), and/or 0.25-1.0% Span 85™ (sorbitan trioleate), and, optionally, N-acetylmuramyl-L-alanyl-D-isogluatminyl-L-alanine-2-(1′-2′-dipalmitoyl-sn-glycero-3-huydroxyphosphophoryloxy)-ethylamine (MTP-PE), for example, the submicron oil-in-water emulsion known as “MF59” (International Publication No. WO 90/14837; U.S. Pat. Nos. 6,299,884 and 6,451,325, incorporated herein by reference in their entireties; and Ott et al., “MF59—Design and Evaluation of a Safe and Potent Adjuvant for Human Vaccines” in Vaccine Design: The Subunit and Adjuvant Approach (Powell, M. F. and Newman, M. J. eds.) Plenum Press, New York, 1995, pp. 277-296). MF59 contains 4-5% w/v Squalene (e.g. 4.3%), 0.25-0.5% w/v Tween 80™, and 0.5% w/v Span 85™ and optionally contains various amounts of MTP-PE, formulated into submicron particles using a microfluidizer such as Model 110Y microfluidizer (Microfluidics, Newton, Mass.). For example, MTP-PE may be present in an amount of about 0-500 μg/dose, more preferably 0-250 μg/dose and most preferably, 0-100 μg/dose. As used herein, the term “MF59-0” refers to the above submicron oil-in-water emulsion lacking MTP-PE, while the term MF59-MTP denotes a formulation that contains MTP-PE. For instance, “MF59-100” contains 100 μg MTP-PE per dose, and so on. MF69, another submicron oil-in-water emulsion for use herein, contains 4.3% w/v squalene, 0.25% w/v Tween 80™, and 0.75% w/v Span 85™ and optionally MTP-PE. Yet another submicron oil-in-water emulsion is MF75, also known as SAF, containing 10% squalene, 0.4% Tween 80™, 5% pluronic-blocked polymer L121, and thr-MDP, also microfluidized into a submicron emulsion. MF75-MTP denotes an MF75 formulation that includes MTP, such as from 100-400 μg MTP-PE per dose.

[1544] Submicron oil-in-water emulsions, methods of making the same and immunostimulating agents, such as muramyl peptides, for use in the compositions, are described in detail in International Publication No. WO 90/14837 and U.S. Pat. Nos. 6,299,884 and 6,451,325, incorporated herein by reference in their entireties.

[1545] Complete Freund's adjuvant (CFA) and incomplete Freund's adjuvant (IFA) may also be used as adjuvants in the invention.

[1546] C. Saponin Formulations

[1547] Saponin formulations, may also be used as adjuvants in the invention. Saponins are a heterologous group of sterol glycosides and triterpenoid glycosides that are found in the bark, leaves, stems, roots and even flowers of a wide range of plant species. Saponin from the bark of the Quillaia saponaria Molina tree have been widely studied as adjuvants. Saponin can also be commercially obtained from Smilax ornata (sarsaprilla), Gypsophilla paniculata (brides veil), and Saponaria officianalis (soap root). Saponin adjuvant formulations include purified formulations, such as QS21, as well as lipid formulations, such as ISCOMs.

[1548] Saponin compositions have been purified using High Performance Thin Layer Chromatography (HP-LC) and Reversed Phase High Performance Liquid Chromatography (RP-HPLC). Specific purified fractions using these techniques have been identified, including QS7, QS17, QS18, QS21, QH-A, QH-B and QH-C. Preferably, the saponin is QS21. A method of production of QS21 is disclosed in U.S. Pat. No. 5,057,540. Saponin formulations may also comprise a sterol, such as cholesterol (see WO96/33739).

[1549] Combinations of saponins and cholesterols can be used to form unique particles called Immunostimulating Complexes (ISCOMs). ISCOMs typically also include a phospholipid such as phosphatidylethanolamine or phosphatidylcholine. Any known saponin can be used in ISCOMs. Preferably, the ISCOM includes one or more of Quil A, QHA and QHC. ISCOMs are further described in EP0109942, WO 96/11711 and WO 96/33739. Optionally, the ISCOMS may be devoid of additional detergent. See WO 00/07621.

[1550] A review of the development of saponin based adjuvants can be found at Barr, et al., “ISCOMs and other saponin based adjuvants,” Advanced Drug Delivery Reviews (1998) 32:247-271. See also Sjolander, et al., “Uptake and adjuvant activity of orally delivered saponin and ISCOM vaccines,” Advanced Drug Delivery Reviews (1998) 32:321-338.

[1551] D. Virosomes and Virus Like Particles (VLPs)

[1552] Virosomes and Virus Like Particles (VLPs) can also be used as adjuvants in the invention. These structures generally contain one or more proteins from a virus optionally combined or formulated with a phospholipid. They are generally non-pathogenic, non-replicating and generally do not contain any of the native viral genome. The viral proteins may be recombinantly produced or isolated from whole viruses. These viral proteins suitable for use in virosomes or VLPs include proteins derived from influenza virus (such as HA or NA), Hepatitis B virus (such as core or capsid proteins), Hepatitis E virus, measles virus, Sindbis virus, Rotavirus, Foot-and-Mouth Disease virus, Retrovirus, Norwalk virus, human Papilloma virus, HIV, RNA-phages, Qβ-phage (such as coat proteins), GA-phage, fr-phage, AP205 phage, and Ty (such as retrotransposon Ty protein p1). VLPs are discussed further in WO 03/024480, WO 03/024481, and Niikura et al., “Chimeric Recombinant Hepatitis E Virus-Like Particles as an Oral Vaccine Vehicle Presenting Foreign Epitopes,” Virology (2002) 293:273-280; Lenz et al., “Papillomarvirus-Like Particles Induce Acute Activation of Dendritic Cells,” Journal of Immunology (2001) 5246-5355; Pinto, et al., “Cellular Immune Responses to Human Papillomavirus (HPV)-16 L1 Healthy Volunteers Immunized with Recombinant HPV-16 L1 Virus-Like Particles,” Journal of Infectious Diseases (2003) 188:327-338; and Gerber et al., “Human Papillomavirus Virus-Like Particles Are Efficient Oral Immunogens when Coadministered with Escherichia coli Heat-Labile Entertoxin Mutant R192G or CpG,” Journal of Virology (2001) 75(10):4752-4760. Virosomes are discussed further in, for example, Gluck et al., “New Technology Platforms in the Development of Vaccines for the Future,” Vaccine (2002) 20:B10-B16 Immunopotentiating reconstituted influenza virosomes (IRIV) are used as the subunit antigen delivery system in the intranasal trivalent INFLEXAL™ product {Mischler & Metcalfe (2002) Vaccine 20 Suppl 5:B17-23} and the INFLUVAC PLUS™ product.

[1553] E. Bacterial or Microbial Derivatives

[1554] Adjuvants suitable for use in the invention include bacterial or microbial derivatives such as:

[1555] (1) Non-Toxic Derivatives of Enterobacterial Lipopolysaccharide (LPS)

[1556] Such derivatives include Monophosphoryl lipid A (MPL) and 3-O-deacylated MPL (3dMPL). 3dMPL is a mixture of 3 De-O-acylated monophosphoryl lipid A with 4, 5 or 6 acylated chains. A preferred “small particle” form of 3 De-O-acylated monophosphoryl lipid A is disclosed in EP 0 689 454. Such “small particles” of 3dMPL are small enough to be sterile filtered through a 0.22 micron membrane (see EP 0 689 454). Other non-toxic LPS derivatives include monophosphoryl lipid A mimics, such as aminoalkyl glucosaminide phosphate derivatives e.g. RC-529. See Johnson et al. (1999) Bioorg Med Chem Lett 9:2273-2278.

[1557] (2) Lipid A Derivatives

[1558] Lipid A derivatives include derivatives of lipid A from Escherichia coli such as OM-174. OM-174 is described for example in Meraldi et al., “OM-174, a New Adjuvant with a Potential for Human Use, Induces a Protective Response with Administered with the Synthetic C-Terminal Fragment 242-310 from the circumsporozoite protein of Plasmodium berghei,” Vaccine (2003) 21:2485-2491; and Pajak, et al., “The Adjuvant OM-174 induces both the migration and maturation of murine dendritic cells in vivo,” Vaccine (2003) 21:836-842.

[1559] (3) Immunostimulatory Oligonucleotides

[1560] Immunostimulatory oligonucleotides suitable for use as adjuvants in the invention include nucleotide sequences containing a CpG motif (a sequence containing an unmethylated cytosine followed by guanosine and linked by a phosphate bond). Bacterial double stranded RNA or oligonucleotides containing palindromic or poly(dG) sequences have also been shown to be immunostimulatory.

[1561] The CpG's can include nucleotide modifications/analogs such as phosphorothioate modifications and can be double-stranded or single-stranded. Optionally, the guanosine may be replaced with an analog such as 2′-deoxy-7-deazaguanosine. See Kandimalla, et al., “Divergent synthetic nucleotide motif recognition pattern: design and development of potent immunomodulatory oligodeoxyribonucleotide agents with distinct cytokine induction profiles,” Nucleic Acids Research (2003) 31(9): 2393-2400; WO02/26757 and WO99/62923 for examples of possible analog substitutions. The adjuvant effect of CpG oligonucleotides is further discussed in Krieg, “CpG motifs: the active ingredient in bacterial extracts?,” Nature Medicine (2003) 9(7): 831-835; McCluskie, et al., “Parenteral and mucosal prime-boost immunization strategies in mice with hepatitis B surface antigen and CpG DNA,” FEMS Immunology and Medical Microbiology (2002) 32:179-185; WO98/40100; U.S. Pat. No. 6,207,646; U.S. Pat. No. 6,239,116 and U.S. Pat. No. 6,429,199.

[1562] The CpG sequence may be directed to TLR9, such as the motif GTCGTT or TTCGTT. See Kandimalla, et al., “Toll-like receptor 9: modulation of recognition and cytokine induction by novel synthetic CpG DNAs,” Biochemical Society Transactions (2003) 31 (part 3): 654-658. The CpG sequence may be specific for inducing a Th1 immune response, such as a CpG-A ODN, or it may be more specific for inducing a B cell response, such a CpG-B ODN. CpG-A and CpG-B ODNs are discussed in Blackwell, et al., “CpG-A-Induced Monocyte IFN-gamma-Inducible Protein-10 Production is Regulated by Plasmacytoid Dendritic Cell Derived IFN-alpha,” J. Immunol (2003) 170(8):4061-4068; Krieg, “From A to Z on CpG,” TRENDS in Immunology (2002) 23(2): 64-65 and WO01/95935. Preferably, the CpG is a CpG-A ODN.

[1563] Preferably, the CpG oligonucleotide is constructed so that the 5′ end is accessible for receptor recognition. Optionally, two CpG oligonucleotide sequences may be attached at their 3′ ends to form “immunomers”. See, for example, Kandimalla, et al., “Secondary structures in CpG oligonucleotides affect immunostimulatory activity,” BBRC (2003) 306:948-953; Kandimalla, et al., “Toll-like receptor 9: modulation of recognition and cytokine induction by novel synthetic GpG DNAs,” Biochemical Society Transactions (2003) 31(part 3):664-658; Bhagat et al., “CpG penta- and hexadeoxyribonucleotides as potent immunomodulatory agents” BBRC (2003) 300:853-861 and WO 03/035836.

[1564] (4) ADP-Ribosylating Toxins and Detoxified Derivatives Thereof.

[1565] Bacterial ADP-ribosylating toxins and detoxified derivatives thereof may be used as adjuvants in the invention. Preferably, the protein is derived from E. coli (i.e., E. coli heat labile enterotoxin “LT), cholera (“CT”), or pertussis (“PT”). The use of detoxified ADP-ribosylating toxins as mucosal adjuvants is described in WO95/17211 and as parenteral adjuvants in WO98/42375. Preferably, the adjuvant is a detoxified LT mutant such as LT-K63, LT-R72, and LTR192G. The use of ADP-ribosylating toxins and detoxified derivatives thereof, particularly LT-K63 and LT-R72, as adjuvants can be found in the following references, each of which is specifically incorporated by reference herein in their entirety: Beignon, et al., “The LTR72 Mutant of Heat-Labile Enterotoxin of Escherichia coli Enhances the Ability of Peptide Antigens to Elicit CD4+ T Cells and Secrete Gamma Interferon after Coapplication onto Bare Skin,” Infection and Immunity (2002) 70(6):3012-3019; Pizza, et al., “Mucosal vaccines: non toxic derivatives of LT and CT as mucosal adjuvants,” Vaccine (2001) 19:2534-2541; Pizza, et al., “LTK63 and LTR72, two mucosal adjuvants ready for clinical trials” Int. J. Med. Microbiol (2000) 290(4-5):455-461; Scharton-Kersten et al., “Transcutaneous Immunization with Bacterial ADP-Ribosylating Exotoxins, Subunits and Unrelated Adjuvants,” Infection and Immunity (2000) 68(9):5306-5313; Ryan et al., “Mutants of Escherichia coli Heat-Labile Toxin Act as Effective Mucosal Adjuvants for Nasal Delivery of an Acellular Pertussis Vaccine: Differential Effects of the Nontoxic AB Complex and Enzyme Activity on Th1 and Th2 Cells” Infection and Immunity (1999) 67(12):6270-6280; Partidos et al., “Heat-labile enterotoxin of Escherichia coli and its site-directed mutant LTK63 enhance the proliferative and cytotoxic T-cell responses to intranasally co-immunized synthetic peptides,” Immunol Lett. (1999) 67(3):209-216; Peppoloni et al., “Mutants of the Escherichia coli heat-labile enterotoxin as safe and strong adjuvants for intranasal delivery of vaccines,” Vaccines (2003) 2(2):285-293; and Pine et al., (2002) “Intranasal immunization with influenza vaccine and a detoxified mutant of heat labile enterotoxin from Escherichia coli (LTK63)” J. Control Release (2002) 85(1-3):263-270. Numerical reference for amino acid substitutions is preferably based on the alignments of the A and B subunits of ADP-ribosylating toxins set forth in Domenighini et al., Mol. Microbiol (1995) 15(6):1165-1167, specifically incorporated herein by reference in its entirety.

[1566] F. Bioadhesives and Mucoadhesives

[1567] Bioadhesives and mucoadhesives may also be used as adjuvants in the invention. Suitable bioadhesives include esterified hyaluronic acid microspheres (Singh et al. (2001) J. Cont. Rele. 70:267-276) or mucoadhesives such as cross-linked derivatives of poly(acrylic acid), polyvinyl alcohol, polyvinyl pyrollidone, polysaccharides and carboxymethylcellulose. Chitosan and derivatives thereof may also be used as adjuvants in the invention. E.g. WO99/27960.

[1568] G. Microparticles

[1569] Microparticles may also be used as adjuvants in the invention. Microparticles (i.e. a particle of ˜100 nm to ˜150 μm in diameter, more preferably ˜200 nm to —30 μm in diameter, and most preferably ˜500 nm to ˜10 μm in diameter) formed from materials that are biodegradable and non-toxic (e.g. a poly(α-hydroxy acid), a polyhydroxybutyric acid, a polyorthoester, a polyanhydride, a polycaprolactone, etc.), with poly(lactide-co-glycolide) are preferred, optionally treated to have a negatively-charged surface (e.g. with SDS) or a positively-charged surface (e.g. with a cationic detergent, such as CTAB).

[1570] H. Liposomes

[1571] Examples of liposome formulations suitable for use as adjuvants are described in U.S. Pat. No. 6,090,406, U.S. Pat. No. 5,916,588, and EP 0 626 169.

[1572] I. Polyoxyethylene ether and Polyoxyethylene Ester Formulations

[1573] Adjuvants suitable for use in the invention include polyoxyethylene ethers and polyoxyethylene esters. WO99/52549. Such formulations further include polyoxyethylene sorbitan ester surfactants in combination with an octoxynol (WO01/21207) as well as polyoxyethylene alkyl ethers or ester surfactants in combination with at least one additional non-ionic surfactant such as an octoxynol (WO 01/21152).

[1574] Preferred polyoxyethylene ethers are selected from the following group: polyoxyethylene-9-lauryl ether(laureth 9), polyoxyethylene-9-steoryl ether, polyoxytheylene-8-steoryl ether, polyoxyethylene-4-lauryl ether, polyoxyethylene-35-lauryl ether, and polyoxyethylene-23-lauryl ether.

[1575] J. Polyphosphazene (PCPP)

[1576] PCPP formulations are described, for example, in Andrianov et al., “Preparation of hydrogel microspheres by coacervation of aqueous polyphophazene solutions,” Biomaterials (1998) 19(1-3):109-115 and Payne et al., “Protein Release from Polyphosphazene Matrices,” Adv. Drug. Delivery Review (1998) 31(3):185-196.

[1577] K. Muramyl Peptides

[1578] Examples of muramyl peptides suitable for use as adjuvants in the invention include N-acetyl-muramyl-L-threonyl-D-isoglutamine (thr-MDP), N-acetyl-normuramyl-1-alanyl-d-isoglutamine (nor-MDP), and N-acetylmuramyl-1-alanyl-d-isoglutaminyl-1-alanine-2-(1′-2′-dipalmitoyl-sn-glycero-3-hydroxyphosphoryloxy)-ethylamine MTP-PE).

[1579] L. Imidazoquinolone Compounds.

[1580] Examples of imidazoquinolone compounds suitable for use adjuvants in the invention include Imiquamod and its homologues, described further in Stanley, “Imiquimod and the imidazoquinolones: mechanism of action and therapeutic potential” Clin Exp Dermatol (2002) 27(7):571-577 and Jones, “Resiquimod 3M,” Curr Opin Investig Drugs (2003) 4(2):214-218.

[1581] The invention may also comprise combinations of aspects of one or more of the adjuvants identified above. For example, the following adjuvant compositions may be used in the invention:
[1582] (1) a saponin and an oil-in-water emulsion (WO 99/11241);
[1583] (2) a saponin (e.g., QS21)+a non-toxic LPS derivative (e.g. 3dMPL) (see WO 94/00153);
[1584] (3) a saponin (e.g., QS21)+a non-toxic LPS derivative (e.g. 3dMPL)+a cholesterol;
[1585] (4) a saponin (e.g. QS21)+3dMPL+IL-12 (optionally+a sterol) (WO 98/57659);
[1586] (5) combinations of 3dMPL with, for example, QS21 and/or oil-in-water emulsions (See European patent applications 0835318, 0735898 and 0761231);
[1587] (6) SAF, containing 10% Squalane, 0.4% Tween 80, 5% pluronic-block polymer L121, and thr-MDP, either microfluidized into a submicron emulsion or vortexed to generate a larger particle size emulsion.
[1588] (7) Ribi™ adjuvant system (RAS), (Ribi Immunochem) containing 2% Squalene, 0.2% Tween 80, and one or more bacterial cell wall components from the group consisting of monophosphorylipid A (MPL), trehalose dimycolate (TDM), and cell wall skeleton (CWS), preferably MPL+CWS (Detox™);
[1589] (8) one or more mineral salts (such as an aluminum salt)+a non-toxic derivative of LPS (such as 3dPML).
[1590] (9) one or more mineral salts (such as an aluminum salt)+an immunostimulatory oligonucleotide (such as a nucleotide sequence including a CpG motif). Combination No. (9) is a preferred adjuvant combination.

[1591] M. Human Immunomodulators

[1592] Human immunomodulators suitable for use as adjuvants in the invention include cytokines, such as interleukins (e.g. IL-1, IL-2, IL-4, IL-5, IL-6, IL-7, IL-12, etc.), interferons (e.g. interferon-γ), macrophage colony stimulating factor, and tumor necrosis factor.

[1593] Aluminum salts and MF59 are preferred adjuvants for use with injectable influenza vaccines. Bacterial toxins and bioadhesives are preferred adjuvants for use with mucosally-delivered vaccines, such as nasal vaccines.

[1594] The immunogenic compositions of the present invention may be administered in combination with an antibiotic treatment regime. In one embodiment, the antibiotic is administered prior to administration of the antigen of the invention or the composition comprising the one or more of the antigens of the invention.

[1595] In another embodiment, the antibiotic is administered subsequent to the administration of the one or more antigens of the invention or the composition comprising the one or more antigens of the invention. Examples of antibiotics suitable for use in the treatment of the Steptococcal infections of the invention include but are not limited to penicillin or a derivative thereof or clindamycin or the like.

### Further Antigens

[1596] The compositions of the invention may further comprise one or more additional Gram positive bacterial antigens which are not associated with an AI. Preferably, the Gram positive bacterial antigens that are not associated with an AI can provide protection across more than one serotype or strain isolate. For example, a first non-AI antigen, in which the first non-AI antigen is at least 90% (i.e., at least 90, 91, 92, 93, 94, 95, 96, 97, 98, 99, or 100%) homologous to the amino acid sequence of a second non-AI antigen, wherein the first and the second non-AI antigen are derived from the genomes of different serotypes of a Gram positive bacteria, may be further included in the compositions. The first non-AI antigen may also be homologous to the amino acid sequence of a third non-AI antigen, such that the first non-AI antigen, the second non-AI antigen, and the third non-AI antigen are derived from the genomes of different serotypes of a Gram positive bacteria. The first non-AI antigen may also be homologous to the amino acid sequence of a fourth non-AI antigen, such that the first non-AI antigen, the second non-AI antigen, the third non-AI antigen, and the fourth non-AI antigen are derived from the genomes of different serotypes of a Gram positive bacteria.

[1597] The first non-AI antigen may be GBS 322. The amino acid sequence of GBS 322 across GBS strains from serotypes Ia, Ib, II, III, V, and VIII is greater than 90%. Alternatively, the first non-AI antigen may be GBS 276. The amino acid sequence of GBS 276 across GBS strain from serotypes Ia, Ib, II, III, V, and VIII is greater than 90%. Table 13 provides the percent amino acid sequence identity of GBS 322 and GBS 276 across different GBS strains and serotypes.

TABLE 13
Conservation of GBS 322 and GBS 276 amino acid sequences

| | | GBS 322 | | GBS 276 | |
|---|---|---|---|---|---|
| Serotype | Strains | cGH | % AA identity | cGH | % AA identity |
| Ia | 090 | + | 98.60 | + | 97.90 |
| | A909 | + | 98.30 | + | 97.90 |
| | 515 | + | 98.80 | + | 97.50 |
| | DK1 | + | | + | |
| | DK8 | + | | + | |
| | Davis | + | | + | |
| Ib | 7357b | + | | + | |
| | H36B | + | 98.30 | + | 97.80 |
| II | 18RS21 | + | 100.00 | + | 99.90 |
| | DK21 | + | | + | |
| III | NEM316 | + | 100.00 | + | 97.00 |
| | COH31 | + | | + | |
| | D136 | + | | + | |
| | M732 | + | 98.00 | + | 100.00 |
| | COH1 | + | 98.30 | + | 100.00 |
| | M781 | + | 98.30 | + | 99.60 |
| No type | CJB110 | + | 98.60 | + | 97.90 |
| | 1169NT | + | 97.40 | + | 97.90 |
| V | CJB111 | + | 100.00 | + | |
| | 2603 | + | 100.00 | + | 100.00 |
| VIII | JM130013 | + | 100.00 | + | 97.90 |
| | SMU014 | + | | + | |
| total | | 22/22 | 98.28 +/− 0.4 | 22/22 | 98.44 +/− 1.094 |

[1598] As an example, inclusion of a non-AI protein, GBS 322, in combination with AI antigens GBS 67, GBS 80, and GBS 104 provided protection to newborn mice in an active maternal immunization assay.

TABLE 14
Active maternal immunization assay for a combination of fragments from
GBS 322, GBS 80, GBS 104, and GBS 67

| | | FACS (Δ Mean) | | | MIX = 322 + 80 + 104 + 67 | | PBS | |
|---|---|---|---|---|---|---|---|---|
| GBS strains | Type | GBS 80 | GBS 67 | GBS 322 | alive/treated | % protection | alive/treated | % protection |
| 515 | Ia | 0 | 409 | 227 | 39/40 | 97 | 6/40 | 15 |
| 7357b- | Ib | 91 | 316 | 102 | 19/30 | 63 | 1/30 | 3 |
| DK21 | II | 0 | 331 | 416 | 25/34 | 73 | 17/48 | 35 |
| 5401 | II | 170 | 618 | 135 | 35/40 | 87 | 3/37 | 8 |
| 3050 | II | 43 | 460 | 188 | 48/48 | 100 | 1/30 | 3 |
| COH1 | III | 305 | 0 | 130 | 36/36 | 100 | 7/40 | 17 |
| M781 | III | 65 | 0 | 224 | 30/40 | 75 | 4/39 | 10 |
| 2603 | V | 125 | 105 | 313 | 27/33 | 82 | 10/35 | 28 |
| CJB111 | V | 370 | 481 | 63 | 25/28 | 89 | 4/46 | 9 |
| JM9130013 | VIII | 597 | 83 | 143 | 37/39 | 95 | 5/40 | 12 |
| JMU071 | VIII | 556 | 79 | 170 | 44/50 | 88 | 18/50 | 36 |
| NT1169 | NT | 0 | 443 | 213 | 12/32 | 37 | 11/35 | 31 |

[1599] In fact, the non-AI GBS 322 antigen may itself provide protection to newborn mice in an active maternal immunization assay.

TABLE 16
Active maternal immunization assay for each of
GBS 80 and GBS 322 antigens

| | | GBS 80 | | | GBS 322 | | |
|---|---|---|---|---|---|---|---|
| | | | Protection | | | Protection | |
| | | FACS | (% survival) | | FACS | (% survival) | |
| GBS strains | Type | Δ Mean | antigen | ctrl- | Δ Mean | antigen | ctrl- |
| CJB111 | V | 370 | 72% | 40% | 63 | 57% | 40% |
| COH1 | III | 305 | 76% | 10% | 130 | 3% | 10% |
| 2603 | V | 82 | 22% | 34% | 313 | 83% | 34% |
| 7357b- | Ib | 91 | 36% | 34% | 102 | 43% | 34% |
| 18RS21 | II | 0 | 15% | 24% | 268 | 84% | 24% |
| DK21 | II | 0 | 10% | 21% | 416 | 67% | 25% |
| A909 | Ia | 0 | 0% | 14% | | | |
| 090 | Ia | 0 | 0% | 0% | | | |
| H36B | Ib | | | | 105 | 34% | 32% |

Thus, inclusion of a non-AI protein in an immunogenic composition of the invention may provide increased protection a mammal.

[1600] The immunogenic compositions comprising S. pneumoniae AI polypeptides may further secondary SP protein antigens which include (a) any of the SP protein antigens disclosed in WO 02/077021 or U.S. provisional application ______, filed Apr. 20, 2005 (Attorney Docket Number 002441.00154), (2) immunogenic portions of the antigens comprising at least 7 contiguous amino acids, (3) proteins comprising amino acid sequences which retain immunogenicity and which are at least 95% identical to these SP protein antigens (e.g., 95%, 96%, 97%, 98%, 99%, or 99.5% identical), and (4) fusion proteins, including hybrid SP protein antigens, comprising (1)-(3).

[1601] Alternatively, the invention may include an immunogenic composition comprising a first and a second Gram positive bacteria non-AI protein, wherein the polynucleotide sequence encoding the sequence of the first non-AI protein is less than 90% (i.e., less than 90, 88, 86, 84, 82, 81, 78, 76, 74, 72, 70, 65, 60, 55, 50, 45, 40, 35, or 30 percent) homologous than the corresponding sequence in the genome of the second non-AI protein.

[1602] The compositions of the invention may further comprise one or more additional non-Gram positive bacterial antigens, including additional bacterial, viral or parasitic antigens. The compositions of the invention may further comprise one or more additional non-GBS antigens, including additional bacterial, viral or parasitic antigens.

[1603] In another embodiment, the GBS antigen combinations of the invention are combined with one or more additional, non-GBS antigens suitable for use in a vaccine designed to protect elderly or immunocomprised individuals. For example, the GBS antigen combinations may be combined with an antigen derived from the group consisting of Enterococcus faecalis, Staphylococcus aureus, Staphylococcus epidermis, Pseudomonas aeruginosa, Legionella pneumophila, Listeria monocytogenes, Neisseria meningitides, influenza, and Parainfluenza virus (‘PIV’).

[1604] Where a saccharide or carbohydrate antigen is used, it is preferably conjugated to a carrier protein in order to enhance immunogenicity {e.g. Ramsay et al. (2001) Lancet 357(9251):195-196; Lindberg (1999) Vaccine 17 Suppl 2:S28-36; Buttery & Moxon (2000) J R Coll Physicians Lond 34:163-168; Ahmad & Chapnick (1999) Infect Dis Clin North Am 13:113-133, vii.; Goldblatt (1998) J. Med. Microbiol. 47:563-567; European patent 0 477 508; U.S. Pat. No. 5,306,492; International patent application WO98/42721; Conjugate Vaccines (eds. Cruse et al.) ISBN 3805549326, particularly vol. 10:48-114; and Hermanson (1996) Bioconjugate Techniques ISBN: 0123423368 or 012342335X}. Preferred carrier proteins are bacterial toxins or toxoids, such as diphtheria or tetanus toxoids. The CRM₁₉₇ diphtheria toxoid is particularly preferred {Research Disclosure, 453077 (January 2002)}. Other carrier polypeptides include the N. meningitidis outer membrane protein (EP-A-0372501), synthetic peptides (EP-A-0378881; EP-A-0427347), heat shock proteins (WO 93/17712; WO 94/03208), pertussis proteins (WO 98/58668; EP A 0471177), protein D from H. influenzae (WO 00/56360), cytokines (WO 91/01146), lymphokines, hormones, growth factors, toxin A or B from C. difficile (WO00/61761), iron-uptake proteins (WO01/72337), etc. Where a mixture comprises capsular saccharides from both serogroups A and C, it may be preferred that the ratio (w/w) of MenA saccharide:MenC saccharide is greater than 1 (e.g. 2:1, 3:1, 4:1, 5:1, 10:1 or higher). Different saccharides can be conjugated to the same or different type of carrier protein. Any suitable conjugation reaction can be used, with any suitable linker where necessary.

[1605] Toxic protein antigens may be detoxified where necessary e.g. detoxification of pertussis toxin by chemical and/or genetic means.

[1606] Where a diphtheria antigen is included in the composition it is preferred also to include tetanus antigen and pertussis antigens. Similarly, where a tetanus antigen is included it is preferred also to include diphtheria and pertussis antigens. Similarly, where a pertussis antigen is included it is preferred also to include diphtheria and tetanus antigens.

[1607] Antigens in the composition will typically be present at a concentration of at least 1 μg/ml each. In general, the concentration of any given antigen will be sufficient to elicit an immune response against that antigen.

[1608] As an alternative to using protein antigens in the composition of the invention, nucleic acid encoding the antigen may be used {e.g. refs. Robinson & Torres (1997) Seminars in Immunology 9:271-283; Donnelly et al. (1997) Annu Rev Immunol 15:617-648; Scott-Taylor & Dalgleish (2000) Expert Opin Investig Drugs 9:471-480; Apostolopoulos & Plebanski (2000) Curr Opin Mol Ther 2:441-447; Ilan (1999) Curr Opin Mol Ther 1:116-120; Dubensky et al. (2000) Mol Med 6:723-732; Robinson & Pertmer (2000) Adv Virus Res 55:1-74; Donnelly et al. (2000) Am J Respir Crit Care Med 162(4 Pt 2):S190-193; and Davis (1999) Mt. Sinai J. Med. 66:84-90}. Protein components of the compositions of the invention may thus be replaced by nucleic acid (preferably DNA e.g. in the form of a plasmid) that encodes the protein.

### Definitions

[1609] The term “comprising” means “including” as well as “consisting” e.g. a composition “comprising” X may consist exclusively of X or may include something additional e.g. X+Y.

[1610] The term “about” in relation to a numerical value x means, for example, x+10%.

[1611] References to a percentage sequence identity between two amino acid sequences means that, when aligned, that percentage of amino acids are the same in comparing the two sequences. This alignment and the percent homology or sequence identity can be determined using software programs known in the art, for example those described in section 7.7.18 of Current Protocols in Molecular Biology (F. M. Ausubel et al., eds., 1987) Supplement 30. A preferred alignment is determined by the Smith-Waterman homology search algorithm using an affine gap search with a gap open penalty of 12 and a gap extension penalty of 2, BLOSUM matrix of 62. The Smith-Waterman homology search algorithm is disclosed in Smith & Waterman (1981) Adv. Appl. Math. 2: 482-489.

[1612] The invention is further illustrated, without limitation, by the following examples.

### Example 1

### Binding of an Adhesin Island Surface Protein, GBS 80, to Fibrinogen and Fibronectin

[1613] This example demonstrates that an Adhesin Island surface protein, GBS 80 can bind to fibrinogen and fibronectin.

[1614] An enzyme-linked immunosorbent assay (ELISA) was used to analyse the in vitro binding ability of recombinant GBS 80 to immobilized extra-cellular matrix (ECM) proteins but not to bovine serum albumin (BSA). Microtiter plates were coated with ECM proteins (fibrinogen, fibronectin, laminin, collagen type IV) and binding assessed by adding varying concentrations of a recombinant form of GBS 80, over-expressed and purified from E. coli (FIG. 5A). Plates were then incubated sequentially with a) mouse anti-GBS 80 primary antibody; b) rabbit anti-mouse AP-conjugated secondary antibody; c) pNPP colorimetric substrate. Relative binding was measured by monitoring absorbance at 405 nm, using 595 nm as a reference wavelength. FIG. 5b shows binding of recombinant GBS 80 to immobilized ECM proteins (1 μg) as a function of concentration of GBS 80. BSA was used as a negative control. Data points represent the means of OD₄₀₅ values±standard deviation for 3 wells.

[1615] Binding of GBS 80 to the tested ECM proteins was found to be concentration dependent and exhibited saturation kinetics. As is also evident from FIG. 5, binding of GBS 80 to fibronectin and fibrinogen was greater than binding to laminin and collagen type IV at all the concentrations tested.

### Example 2

### GBS 80 is Required for Surface Localization of GBS 104

[1616] This example demonstrates that co-expression of GBS 80 is required for surface localization of GBS 104.

[1617] The polycistronic nature of the Adhesin Island I mRNA was investigated through reverse transcriptase-PCR (RT-PCR) analysis employing primers designed to detect transcripts arising from contiguous genes. Total RNA was isolated from GBS cultures grown to an optical density at 600 nm (OD₆₀₀) of 0.3 in THB (Todd-Hewitt broth) by the RNeasy Total RNA isolation method (Qiagen) according to the manufacturer's instructions. The absence of contaminating chromosomal DNA was confirmed by failure of the gene amplification reactions to generate a product detectable by agarose gel electrophoresis, in the absence of reverse transcriptase. RT-PCR analysis was performed with the Access RT-PCR system (Promega) according to the manufacturer's instructions, employing PCR cycling temperatures of 60° C. for annealing and 70° C. for extension. Amplification products were visualized alongside 100-bp DNA markers in 2% agarose gels after ethidium bromide staining.

[1618] FIG. 5 shows that all the genes are co-transcribed as an operon. A schematic of the AI-1 operon is shown above the agarose gel analysis of the RT-PCR products. Large rectangular arrows indicate the predicted transcript direction. Primer pairs were selected such as “1-4” cross the 3′ finish-5′ start of successive genes and overlap each gene by at least 200 bp. Additionally, “1” crosses a putative rho-independent transcriptional terminator. “5” is an internal GBS 80 control and “6” is an unrelated control from a highly expressed gene. Lanes: “a”: RNA plus RTase enzyme; “b” RNA without RTase; “c”: genomic DNA control.

[1619] In the effort to elucidate the functions of the AI-1 proteins, in frame deletions of all of the genes within the operon have been constructed and the resulting mutants characterized with respect to surface exposure of the encoded antigens (see FIG. 8).

[1620] Each in-frame deletion mutation was constructed by splice overlap extension PCR (SOE-PCR) essentially as described by Horton et al. [Horton R. M., Z. L. Cai, S. N. Ho, L. R. Pease (1990) Biotechniques 8:528-35] using suitable primers and cloned into the temperature sensitive shuttle vector pJRS233 to replace the wild type copy by allelic exchange [Perez-Casal, J., J. A. Price, et al. (1993) Mol Microbiol 8(5): 809-19.]. All plasmid constructions utilized standard molecular biology techniques, and the identities of DNA fragments generated by PCR were verified by sequencing. Following SOE-PCR, the resulting mutant DNA fragments were digested with XhoI and EcoRI, and ligated into a similarly digested pJRS233. The resulting vectors were introduced by electroporation into the chromosome of 2603 and COH1 GBS strains in a three-step process, essentially as described in Framson et al. [Framson, P. E., A. Nittayajarn, J. Merry, P. Youngman, and C. E. Rubens. (1997) Appl. Environ. Microbiol. 63(9):3539-47]. Briefly, the vector pJRS233 contains an erm gene encoding erythromycin resistance and a temperature-sensitive gram-positive replicon that is active at 30° C. but not at 37° C. Initially, the constructs are electroporated into GBS electro-competent cells prepared as described by Frameson et al., and transformants containing free plasmid are selected by their ability to grow at 30° C. on Todd-Hewitt Broth (THB) agar plates containing 1 μg/ml erythromycin. The second step includes a selection step for strains in which the plasmid has integrated into the chromosome via a single recombination event over the homologous plasmid insert and chromosome sequence by their ability to grow at 37° C. on THB agar medium containing 1 mg/ml erythromycin. In the third step, GBS cells containing the plasmid integrated within the chromosome (integrants) are serially passed in broth culture in the absence of antibiotics at 30° C. Plasmid excision from the chromosome via a second recombination event over the duplicated target gene sequence either completed the allelic exchange or reconstituted the wild-type genotype. Subsequent loss of the plasmid in the absence of antibiotic selection pressure resulted in an erythromycin-sensitive phenotype. In order to assess gene replacement a screening of erythromycin-sensitive colonies was performed by analysis of the target gene PCR amplicons.

[1621] FIG. 7 reports a schematic of the IS-1 operon for each knock-out strain generated, along with the deletion position within the amino acidic sequence. Most data presented here concern the COH1 deletion strains, in which the expression of each of the antigens is higher by DNA microarray analysis as well as detectable by FACS analysis (see FIG. 8). The double mutant in 2603 Δ80, Δ04 double mutant was constructed by sequential allelic exchanges of the shown alleles.

[1622] Immunization Protocol

[1623] Immune sera for FACS experiments were obtained as follows.

[1624] Groups of 4 CD-1 outbred female mice 6-7 weeks old (Charles River Laboratories, Calco Italy) were immunized with the selected GBS antigens, (20 μg of each recombinant GBS antigen), suspended in 100 μl of PBS. Each group received 3 doses at days 0, 21 and 35. Immunization was performed through intra-peritoneal injection of the protein with an equal volume of Complete Freund's Adjuvant (CFA) for the first dose and Incomplete Freund's Adjuvant (IFA) for the following two doses. In each immunization scheme negative and positive control groups are used. Immune response was monitored by using serum samples taken on day 0 and 49.

[1625] FACS Analysis

[1626] Preparation of paraformaldehyde treated GBS cells and their FACS analysis were carried out as follows.

[1627] GBS serotype COH1 strain cells were grown in Todd Hewitt Broth (THB; Difco Laboratories, Detroit, Mich.) to OD600 nm=0.5. The culture was centrifuged for 20 minutes at 5000 rpm and bacteria were washed once with PBS, resuspended in PBS containing 0.05% paraformaldehyde, and incubated for 1 hours at 37 ° C. and then overnight at 4° C. 50 μl of fixed bacteria (OD600 0.1) were washed once with PBS, resuspended in 20 μl of Newborn Calf Serum, (Sigma) and incubated for 20 min. at room temperature. The cells were then incubated for 1 hour at 4° C. in 100 μl of preimmune or immune sera, diluted 1:200 in dilution buffer (PBS, 20% Newborn Calf Serum, 0.1% BSA). After centrifugation and washing with 200 μl of washing buffer (0.1% BSA in PBS), samples were incubated for 1 hour at 4° C. with 50 μl of R-Phicoerytrin conjugated F(ab)2 goat anti-mouse IgG (Jackson ImmunoResearch Laboratories; Inc.), diluted 1:100 in dilution buffer. Cells were washed with 200 μl of washing buffer and resuspended in 200 μl of PBS. Samples were analysed using a FACS Calibur apparatus (Becton Dickinson, Mountain View, Calif.) and data were analyzed using the Cell Quest Software (Becton Dickinson). A shift in mean fluorescence intensity of >75 channels compared to preimmune sera from the same mice was considered positive. This cutoff was determined from the mean plus two standard deviations of shifts obtained with control sera raised against mock purified recombinant proteins from cultures of E. coli carrying the empty expression vector and included in every experiment. Artifacts due to bacterial lysis were excluded using antisera raised against 6 different known cytoplasmic proteins all of which were negative

[1628] FACS data on COH1 single KO mutants for GBS 104 and GBS 80 indicated that GBS 80 is required for surface localization of GBS 104.

[1629] As shown in FIG. 8, GBS 104 is not surface exposed in the Δ80 strain (second column, bottom), but is present in the whole protein extracts (see FIG. 10). Mean shift values suggest that GBS 104 is partially responsible for GBS 80 surface exposure (Mean shift of GBS 80 is reduced to ˜60% wild-type levels in Δ104), and that GBS 80 is over-expressed in the complemented strain (mean shift value ˜200% wild-type level). The Δ80/pGBS 80 strain contains the GBS 80 orf cloned in the shuttle-vector pAM401 (Wirth, R., F. Y. An, et al. (1986). J Bacteriol 165(3): 831-6). The vector alone does not alter the secretion pattern of GBS 104 (right column) FACS was performed on mid-log fixed bacteria with mouse polyclonal antibodies as indicated at left. Black peak is pre-immune sera, colored peaks are sera from immunized animals.

### Example 3

### Deletion of GBS 80 Causes Attenuation In Vivo

[1630] This example demonstrates that deletion of GBS 80 causes attenuation in vivo, suggesting that this protein contributes to bacterial virulence.

[1631] By using a mouse animal model, we studied the role of GBS 80 and GBS 104 in the virulence of S. agalactiae.

[1632] Groups of ten outbred female mice 5-6 week weeks old (Charles River Laboratories, Calco Italy) were inoculated intraperitoneally with different dilutions of the mutant strains and LD50 (lethal dose 50) were calculated according to the method of Reed and Muench [Reed, L. J. and H. Muench (1938). The American Journal of Hygiene 27(3): 493-7]. As presented in Table 3 below the number of colony forming units (cfu) counted for both the Δ80 and the Δ80, Δ104 double mutants is about 10 fold higher when compared to the wild type strain suggesting that inactivation of GBS 80 but not GBS 104 is responsible for an attenuation in virulence. This finding indicates that GBS 80 gene in the AI-1 might contribute to virulence.

TABLE 3
Lethal dose 50% analysis of AI-1 mutants
in the 2603 strain background.

| GBS strain | LD₅₀, cfu | Number of Experiments |
|---|---|---|
| Wild Type 2603 | 2 × 10⁸ | 4 |
| Δ104 mutant | ~2 × 10⁸ | 1 |
| Δ80 mutant | 2.6 × 10⁹ | 3 |
| Δ80, Δ104 double mutant | ~2 × 10⁹ | 1 |

LD₅₀s were performed by IP injection of female CD1 mice at an age of 5-6 weeks. LD₅₀s were calculated by the method of Reed and Muench (8).

### Example 4

### Effect of Adhesin Island Sortase Deletions on Surface Antigen Presentation

[1633] This example demonstrates the effect of adhesin island sortase deletions on surface antigen presentation.

[1634] FACS analysis results set forth in FIG. 9 show that a deletion in sortase SAG0648 prevented GBS 104 from reaching the surface and slightly reduced the surface exposure of GBS 80 (fourth panel; mean shift value ˜60% wild-type COH1). In the double sortase knock-out strain, neither antigen was surface exposed (far right panel). Either sortase alone was sufficient for GBS 80 to arrive at the bacterial surface (third and fourth columns, top). No effect was seen on surface exposure of antigens GBS 80 or GBS 104 in the ΔGBS 52 strain.

[1635] Antibodies derived from purified GBS 52 were either non-specific or were FACS negative for GBS 52. FACS analysis was performed as described above (see EXAMPLE 2).

[1636] As shown in FIG. 10, inactivation of GBS 80 has no effect on GBS 104 expression as much as GBS 104 knock out doesn't change the total amount GBS 80 expressed. The Western blot of whole protein extracts (strains noted above lanes) probed with anti-GBS 80 antisera is shown in panel A. Arrow indicates expected size of GBS 80 (60 kDa). GBS 80 antibodies recognize a doublet, the lower band is not present in ΔGBS 80 strains. Panel B shows a Western blot of whole protein extracts probed with anti-GBS 104 antisera. Arrow indicates expected size of GBS 104 (99.4 kDa). Protein extracts were prepared from the same bacterial cultures used for FACS (FIGS. 8 and 9). In conclusion, although GBS 104 does not arrive at the surface in the Δ80 strain by FACS (FIG. 8, second column), it is present at approximately wild-type levels in the whole protein preps (B, second lane). Approximately 20 μg of each protein extract was loaded per lane.

[1637] Western-Blot Analysis

[1638] Aliquots of total protein extract mixed with SDS loading buffer (1×: 60 mM TRIS-HCl pH 6.8, 5% w/v SDS, 10% v/v glycerin, 0.1% Bromophenol Blue, 100 mM DTT) and boiled 5 minutes at 95° C., were loaded on a 12.5% SDS-PAGE precast gel (Biorad). The gel is run using a SDS-PAGE running buffer containing 250 mM TRIS, 2.5 mM Glycine and 0.1% SDS. The gel is electroblotted onto nitrocellulose membrane at 200 mA for 60 minutes. The membrane is blocked for 60 minutes with PBS/0.05% Tween-20 (Sigma), 10% skimmed milk powder and incubated O/N at 4° C. with PBS/0.05% Tween 20, 1% skimmed milk powder, with the appropriate dilution of the sera. After washing twice with PBS/0.05% Tween, the membrane is incubated for 2 hours with peroxidase-conjugated secondary anti-mouse antibody (Amersham) diluted 1:4000. The nitrocellulose is washed three times for 10 minutes with PBS/0.05% Tween and once with PBS and thereafter developed by Opti-4CN Substrate Kit (Biorad).

### Example 5

### Binding of Adhesin Island Proteins to Epithelial Cells and Effect of Adhesin Island Proteins on Capacity of GBS to Adhere to Epithelial Cells

[1639] This example illustrates the binding of AI proteins to epithelial cells and the effect of AI proteins on the capacity of GBS to adhere to epithelial cells.

[1640] Applicants analysed whether recombinant AI surface proteins GBS 80 or GBS 104 would demonstrate binding to various epithelial cells in a FACS analysis. Applicants also analysed whether deletion of AI surface proteins GBS 80 or GBS 104 would effect the capacity of GBS to adhere to and invade ME180 cervical epithelial cells.

[1641] As shown in FIG. 28, deletion of GBS 80 sequence from GBS strain isolate 2603 (serotype V) did not affect the capacity of the mutated GBS to adhere to and invade ME180 cervical epithelial cells. Here ME180 cervical carcinoma epithelial cells were infected with wild type GBS 2603 or GBS 2603 Δ80 isogenic mutant. After two hours of infection, non-adherent bacteria were washed off and infection prolonged for a further two hours and four hours. In invasion experiments, after each time point, was followed by a two hour antibiotic treatment. Cells were then lysed with 1% saponin and lysates platedon TSA plates. As shown in FIG. 28, there was little difference between the percent invasion or percent adhesion of wild type and mutant strains up to the four hour time point.

[1642] FIG. 30 repeats this experiment with both Δ104 and Δ80 mutants from a different strain isolate. Here, ME180 cervical carcinoma epithelial cells were infected with GBS strain isolate COH (serotype III) wild type or COH1 ΔGBS 104 or COH1 Δ80 isogenic mutant. After one hour of infection, non-adherent bacteria were washed off and the cells were lysed with 1% saponin. The lysates were plated on TSA plates. As shown in FIG. 30, while there was little difference in the percent invasion, there was a significant decrease in the percent association of the Δ104 mutant compared to both the wild type and Δ80 mutant.

[1643] The affect of AI surface proteins on the ability of GBS to translocate through an epithelial monolayer was also analysed. As shown in FIG. 31, a GBS 80 knockout mutant strain partially loses the ability to translocate through an epithelial monolayer. Here epithelial monolayers were inoculated with wildtype or knockout mutant in the apical chamber of a transwell system for two hours and then non-adherent bacteria were washed off. Infection was prolonged for a further two and four hours. Samples were taken from the media of the basolateral side and the number of colony forming unties measured. Transepithelial electrical resistance measured prior to and after infection gave comparable values, indicating the maintenance of the integrity of the monolayer. By the six hour time point, the Δ80 mutants demonstrated a reduced percent transcytosis.

[1644] A similar experiment was conducted with GBS 104 knock out mutants. Here, as shown in FIG. 22, the Δ104 mutants also demonstrated a reduced percent transcytosis, indicating that the mutant strains translocate through an epithelial monolayer less efficiently than their isogenic wild type counterparts.

[1645] Applicants also studied the effect of AI proteins on the capacity of a GBS strain to invade J774 macrophage-like cells. Here, J774 cells were infected with GBS COH1 wild type or COH1 ΔGBS104 or COH1 ΔGBS80 isogenic mutants. After one hour of infection, non-adherent bacteria were washed off and intracellular bacteria were recovered at two, four and six hours post antibiotic treatment. At each time point, cells were lysed with 0.25% Triton X-100 and lysates plated on TSA plates. As shown in FIG. 32, the Δ104 mutant demonstrated a significantly reduced percent invasion compared to both the wild type and Δ80 mutant.

### Example 6

### Hyperoligomeric Structures Comprising AI Surface Proteins GBS 80 and GBS 104

[1646] This example illustrates hyperoligomeric structures comprising AI surface proteins GBS 80 and GBS 104. A GBS isolate COH1 (serotype III) was adapted to increase expression of GBS 80. FIG. 34 presents a regular negative stain electron micrograph of this mutant; no pilus or hyperoligomeric structures are distinguishable on the surface of the bacteria. When the EM stain is based on anti-GBS 80 antibodies labelled with 10 or 20 nm gold particles, the presence of GBS 80 throughout the hyperoligomeric structure is clearly indicated (FIGS. 36, 37 and 38). EM staining against GBS 104 (anti-GBS 104 antibodies labelled with 10 nm gold particles) also reveals the presence of GBS 104 primarily on or near the surface of the bacteria or potentially associated with bacterial peptidoglycans (FIG. 39). Analysis of this same strain (over-expressing GBS 80) with a combination of both anti-GBS 80 (using 20 nm gold particles) and anti-GBS 104 (using 10 nm gold particles) reveals the presence of GBS 104 on the surface and within the hyperoligomeric structures (see FIGS. 40 and 41).

### Example 7

### GBS 80 is Necessary for Polymer Formation and GBS 104 and Sortase SAG0648 are Necessary for Efficient Pili Assembly

[1647] This example demonstrates that GBS 80 is necessary for formation of polymers and that GBS 104 and sortase SAG0648 are necessary for efficient pili assembly. GBS 80 and GBS 104 polymeric assembly was systematically analyzed in Coh1 strain single knock out mutants of each of the relevant coding genes in AI-1 (GBS 80, GBS 104, GBS 52, sag0647, and sag0648). FIG. 41 provides Western blots of total protein extracts (strains noted above lanes) probed with either anti-GBS 80 (left panel) sera or anti-GBS 104 sera (right panel) for each of these Coh1 and Coh1 knock out strains. (Coh1, wild type Coh1; Δ80, Coh1 with GBS 80 knocked out; Δ104, Coh1 with GBS 104 knocked out; Δ52, Coh1 with GBS 52 knocked out; Δ647, Coh1 with SAG0647 knocked out; Δ648, Coh1 with SAG0648 knocked out, Δ647-8, Coh1 with SAG0647 and SAG0648 knocked out; Δ80/pGBS80, Coh1 with GBS 80 knocked out but complemented with a high copy number plasmid expressing GBS 80. Asterisks identify the monomer of GBS 80 and GBS 104.)

[1648] The smear of immunoreactive material observed in the wild type strain, along with its disappearance in Δ80 and Δ104 mutants, is consistent with the notion that such high molecular weight structures are composed of covalently linked (SDS-resistant) GBS 80 and GBS 104 subunits. The immunoblotting with both anti-GBS 80 (α-GBS 80) and anti-GBS 104 (α-GBS 104) revealed that deletion of sortase SAG0648 also interferes with the assembly of high molecular weight species, whereas the knock out mutant of the second sortase (SAG0647), even if somehow reduced, still maintains the ability to form polymeric structures.

[1649] Total extracts form GBS were prepared as follows. Bacteria were grown in 50 ml of Todd-Hewitt broth (Difco) to an OD600 nm of 0.5-0.6 and successively pelleted. After two washes in PBS the pellet was resuspended and incubated 3 hours at 37° C. with mutanolisin. Cells were then lysed with at least three freezing-thawing cycles in dry ice and a 37° C. bath. The lysate was then centrifuged to eliminate the cellular debris and the supernatant was quantified. Approximately 40 μg of each protein extract was separated on SDS-PAGE. The gel was then subjected to immunoblotting with mice antisera and detected with chemiluminescence.

### Example 8

### GBS 80 is Polymerized by an AI-2 Sortase

[1650] This example illustrates that GBS 80 can be polymerized not only by AI-1 sortases, but also by AI-2 sortases. FIG. 42 shows total cell extract immunoblots of GBS 515 strain, which lacks AI-1. The left panel, where an anti-GBS 67 sera was used, shows that GBS 67 from AI-2 is assembled into high-molecular weight-complexes, suggesting the formation of a second type of pilus. The same high molecular structure is observed when GBS 80 is highly expressed by reintroducing the gene within a plasmid (pGBS 80). By using anti-GBS 80 (right panel) sera on the same extracts, again it is observed that, with GBS 80 over expression (515/pGBS 80), a high-molecular weight structure is assembled. This implies that, in the absence of AI-1 sortases, AI-2 sortases (SAG1405 and SAG1406) can complement the lacking function, still being able to assemble GBS 80 in a pilus structure.

### Example 9

### Coh1 Produces a High Molecular Weight Molecule, the GBS 80 Pilin

[1651] This example illustrates that Coh1 produces a high molecular weight molecule, greater than 1000 kDa, which is the GBS 80 pilin. FIG. 43 provides silver-stained electrophoretic gels that show that Coh1 produces two macromolecules. One of these macromolecules disappears in the Coh1 GBS 80 knock out cells, but does not disappear in the Coh1 GBS 52 knock out mutant cells. The last two lanes on the right were loaded with 15 times the amount loaded in the other lanes. This was done in order to be able to count the bands. By doing this, a conservative size estimate of the top bands was calculated by starting at 240 kDa and considering each of 14 higher bands as the result of consecutive additions of a GBS 80 monomer.

[1652] Coh1, wild type Coh1; Δ80, Coh1 cells with GBS 80 knocked out; Δ52, Coh1 cells with GBS 52 knocked out; Δ80/pGBS 80, Coh1 cells with GBS 80 knocked out and complemented with a high copy number construct expressing GBS 80.

### Example 10

### GBS 52 is a Minor Component of the GBS Pilus

[1653] This example illustrates that GBS 52 is present in the GBS pilus and is a minor component of the pilus. FIG. 45 shows an immunoblot of total cell extracts from a GBS Coh1 strain and a GBS Coh1 strain knocked out for GBS 52 (Δ52). The total cell extracts were immunoblotted anti-GBS 80 antisera (left) and anti-GBS 52 antisera (right). Immunoblotting was performed using a 3-8% Tris-acetate polyacrylamide gel (Invitrogen) which provided excellent separation of large molecular weight proteins (see FIG. 41). When the gel was incubated with anti-GBS 80 sera, the bands from the Coh1 wild-type strain appeared shifted when compared to the Δ52 mutant. This observation indicated a different size of the pilus polymeric components in the two strains. When the same gel was stripped and incubated with anti-GBS 52 sera the high-molecular subunits in the Coh1 wild-type strain showed similar molecular size of those in the correspondent lane in the left panel. These findings confirmed that GBS 52 is indeed associated with GBS 80 macro-molecular structures but represents a minor component of the GBS pilus.

### Example 11

### Pilus Structures are Present in the Supernatant of GBS Bacterial Cultures

[1654] This example illustrates that the pilus structure assembled in Coh1 GBS is present in the supernatant of a bacterial cell culture. FIG. 46 shows an immunoblot where the protein extract of the supernatant from cultures of different GBS mutant strains (117=Coh1 GBS 80 knockout; 159=Coh1 GBS 104 knockout; 202=Coh1 GBS 52 knockout; 206=Coh1 GBS sag0647 knockout; 208=Coh1 GBS sag0648 knockout; 197=Coh1 GBS sag0647/sag0648 knockout; 179=Coh1 GBS 80 knockout complemented with a high copy plasmid expressing GBS 80). GBS 80 antisera detects the presence of pilus structures in the appropriate Coh1 strains.

[1655] The protein extract was prepared as follows. Bacteria were grown in THB to an OD_{600 nm} of 0.5-0.6 and the supernatant was separated from the cells by centrifugation. The supernatant was then filtered (Ø0.2 μm) and 1 ml was added with 60% TCA for protein precipitation.

[1656] GBS pili were also extracted from the fraction of surface-exposed proteins in Coh1 strain and its GBS 80 knock out mutant as described hereafter. Bacteria were grown to an OD_{600 nm} of 0.6 in 50 ml of THB at 37° C. Cells were washed once with PBS and the pellet was then resuspended in 0.1 M KPO4 pH 6.2, 40% sucrose, 10 mM MgCl2, 400 U/ml mutanolysin and incubated 3 hours at 37° C. Protoplasts were separated by centrifugation and the supernatant was recovered and its protein content measured.

[1657] In order to study the dynamics of pilus production during different growth phases, 1 ml supernatant of a culture at different OD_{600 nm} was TCA precipitated and loaded onto a 3-8% SDS-PAGE as described before. FIG. 47 shows the corresponding Western blot with GBS 80 anti-sera. The first group of lanes (left five sample lanes) refer to a Coh1 strain growth (OD_{600 nm} are noted above the lanes) whereas the second group of lanes (right five samples) are from a GBS 80 knock out strain over expressing GBS 80. The experiment shows that pilus macromolecular structures can be found in the supernatant in all of the growth phases tested.

### Example 12

### In GBS Strain Coh1, Only GBS 80 and a Sortase (sag0647 or sag0648) is Required for Polymerization

[1658] This example describes requirements for pilus formation in Coh1. FIG. 48 shows a Western blot of total protein extracts (prepared as described before) using anti-GBS 80 sera on Coh1 clones. (Coh1, wild type Coh1; Δ104, Coh1 knocked out for GBS 104, Δ647, Coh1 knocked out for sag0647, Δ648, Coh1 knocked for sag0648, Δ647-8, Coh1 knocked out for sag0647 and sag0648; 515, wild type bacterial strain 515, which lacks an AI-1; p80 a high copy number plasmid which expresses GBS 80.) The data show that only the double sortase mutant is unable to polymerize GBS 80 indicating that the ‘conditio sine qua non’ for pilus polymerization is the co-existence of GBS 80 with at least one sortase. This result leads to a reasonable assumption that SAG1405 and SAG1406 are responsible for polymerization in this strain.

### Example 13

### GBS 80 Can be Expressed in L. lactis Under its Own Promoter and Terminator Sequences

[1659] This example demonstrates that L. lactis, a non-pathogenic bacterium, can express GBS AI polypeptides such as GBS 80. L. lactis M1363 (J. Bacteriol. 154 (1983):1-9) was transformed with a construct encoding GBS 80. Briefly, the construct was prepared by cloning a DNA fragment containing the gene coding for GBS 80 under its own promoter and terminator sequences into plasmid pAM401 (a shuttle vector for E. coli and other Gram positive bacteria; J. Bacteriol. 163 (1986):831-836). Total extracts of the transformed bacteria in log phase were separated on SDS-PAGE, transferred to membranes, and incubated with antiserum against GBS 80. A polypeptide corresponding to the molecular weight of GBS 80 was detected in the lanes containing total extracts of L. lactis transformed with the GBS 80 construct. See FIGS. 133A and 133B, lanes 6 and 7. This same polypeptide was not detected in the lane containing total extracts of L. lactis not transformed with the GBS 80 construct, lane 9. This example shows that L. lactis can express GBS 80 under its own promoter and terminator.

### Example 14

### L. lactis Modified to Express GBS AI-1 Under the GBS 80 Promoter and Terminator Sequences Expresses GBS 80 in Polymeric Structures

[1660] This example demonstrates the ability of L. lactis to express GBS AI-1 polypeptides and to incorporate at least some of the polypeptides into oligomers. L. lactis was transformed with a construct containing the genes encoding GBS AI-1 polypeptides. Briefly, the construct was prepared by cloning a DNA fragment containing the genes for GBS 80, GBS 52, SAG0647, SAG0648, and GBS 104 under the GBS 80 promoter and terminator sequences into construct pAM401. The construct was transformed into L. lactis M1363. Total extracts of log phase transformed bacteria were separated on reducing SDS-PAGE, transferred to membranes, and incubated with antiserum against GBS 80. A polypeptide with a molecular weight corresponding to the molecular weight of GBS 80 was detected in the lanes containing L. lactis transformed with the GBS AI-1 encoding construct. See FIG. 134, lane 2. In addition, the same lane also showed immunoreactivity of polypeptides having higher molecular weights than the polypeptide having the molecular weight of GBS 80. These higher molecular weight polypeptides are likely oligomers of GBS 80. Oligomers of similar molecular weights were also observed on a Western blot of the culture supernatant of the transformed L. lactis. See lane 4 of FIG. 135. Thus, this example shows that L. lactis transformed to express GBS AI-1 can efficiently polymerize GBS 80 in the form of a pilus. This pilus structure can likely be purified from either the cell culture supernatant or cell extracts.

### Example 15

### Cloning and Expression of S. pneumoniae Sp0462

[1661] This example describes the production of a clone encoding a Sp0462 polypeptide and expression of the clone. To produce a clone encoding Sp0462, the open reading frame encoding Sp0462 was amplified using primers that annealed within the full-length Sp0462 open reading frame sequence. FIG. 150A provides a 893 amino acid sequence of Sp0462. The primers used to produce a clone encoding the Sp0462 polypeptide are shown in FIG. 150B. These primers annealed to the nucleotide sequences encoding the amino acid residues indicated by underlining in FIG. 150A. Amplification of the open reading frame encoding Sp0462 using these primers produced the amplicon shown at lane 2 of the agarose gel provided in FIG. 160. The Sp0462 clone encodes amino acid residues 38-862 of the 893 amino acid residue Sp0462 protein; the italicized residues in FIG. 150A were eliminated. FIG. 151A provides a schematic depiction of the recombinant Sp0462 polypeptide. FIG. 151B shows a schematic depiction of the full-length Sp0462 polypeptide. Both the recombinant Sp0462 encoded by the clone and the full-length Sp0462 protein have two collagen binding protein type B (Cna B) domains and a von Hillebrand factor A (vWA) domain. The cloned recombinant Sp0462 lacks the LPXTG motif present in the full-length Sp0462 protein. Western blot analysis for expression of the Sp0462 clone did not result in detection of polypeptides with serum obtained from S. pneumoniae-infected patients (FIG. 152A) or GBS 80 antiserum (FIG. 152B).

### Example 16

### Cloning and Expression of S. pneumoniae Sp0463

[1662] This example describes the production of a clone encoding a Sp0463 polypeptide and detection of recombinant Sp0463 polypeptide expressed from the clone. To produce a clone encoding Sp0463, the open reading frame encoding Sp0463 was amplified using primers that annealed within the full-length Sp0463 open reading frame sequence. FIG. 153A provides a 665 amino acid sequence of Sp0463. The primers used to produce the clone encoding Sp0463 polypeptide are shown in FIG. 153B. These primers annealed to the nucleotide sequences encoding the amino acid residues indicated by underlining in FIG. 153A. Amplification of the open reading frame encoding Sp0463 using these primers produced the amplicon shown at lane 3 of the agarose gel provided in FIG. 160. The Sp0463 clone encodes amino acid residues 23-627 of the 665 amino acid residue Sp0463 protein; the italicized residues in FIG. 153A were eliminated. FIG. 154A provides a schematic depiction of the recombinant Sp0463 polypeptide. FIG. 154B shows a schematic depiction of the full-length Sp0463 polypeptide. Both the recombinant Sp0463 encoded by the clone and the full-length Sp0463 protein have a Cna B domain and an E box motif. The cloned recombinant Sp0463 lacks the LPXTG motif present in the full-length Sp0463 protein. Expression of the Sp0463 clone resulted in the detection of a 60 kD polypeptide, the expected molecular weight of the recombinant Sp0463 polypeptide, by Western blot analysis. See FIG. 155.

### Example 17

### Cloning and Expression of S. pneumoniae Sp0464

[1663] This example describes the production of a clone encoding a Sp0464 polypeptide and detection of recombinant Sp0464 polypeptide expressed from the clone. To produce a clone encoding Sp0464, the open reading frame encoding Sp0464 was amplified using primers that annealed either within the full-length Sp0464 open reading frame sequence. FIG. 157A provides a 393 amino acid sequence of Sp0464. The primers used to produce a clone encoding the Sp0464 polypeptide are shown in FIG. 157B. These primers annealed to the nucleotide sequences encoding the amino acid residues indicated by underlining in FIG. 157A. Amplification of the open reading frame encoding Sp0464 using these primers produced the amplicon shown at lane 4 of the agarose gel provided in FIG. 160. The Sp0464 clone encodes amino acid residues 19-356 of the 393 amino acid residue Sp0464 protein; the italicized residues in FIG. 157A were eliminated. FIG. 158A provides a schematic depiction of the recombinant Sp0464 polypeptide. FIG. 158B shows a schematic depiction of the full-length Sp0464 polypeptide. Both the recombinant Sp0464 encoded by the clone and the full-length Sp0464 protein have two Cna B domains. The cloned recombinant Sp0464 lacks the LPXTG motif present in the full-length Sp0464 protein. Expression of the Sp0464 clone resulted in the detection of a 38 kD polypeptide, the expected molecular weight of the recombinant Sp0464 polypeptide, by Western blot analysis. See FIG. 159.

### Example 18

### Intranasal Immunization of Mice With Recombinant L. lactis Expressing GBS 80 and Subsequent Challenge

[1664] This example describes a method of intranasally immunizing mice using L. lactis that express GBS 80. Intranasal immunization consisted of 3 doses at days 0, 14 and 28, each dose administered in three consecutive days. Each day, groups of 3 CD-1 outbred female mice 6-7 weeks old (Charles River Laboratories, Calco Italy) were immunized intranasally with 10⁹ or 10¹⁰ CFU of the recombinant Lactococcus lactis suspended in 20 μl of PBS. In each immunization scheme negative (wild-type L. lactis) and positive (recombinant GBS80) control groups were used. The immune response of the dams was monitored by using serum samples taken on day 0 and 49. The female mice were bred 2-7 days after the last immunization (at approximately t=36-37), and typically had a gestation period of 21 days. Within 48 hours of birth, the pups were challenged via I.P. with GBS in a dose approximately equal to an amount which would be sufficient to kill 90% of immunized pups (as determined by empirical data gathered from PBS control groups). The GBS challenge dose is preferably administered in 50 ml of THB medium. Preferably, the pup challenge takes place at 56 to 61 days after the first immunization. The challenge inocula were prepared starting from frozen cultures diluted to the appropriate concentration with THB prior to use. Survival of pups was monitored for 5 days after challenge.

### Example 19

### Subcutaneous Immunization of Mice With Recombinant L. lactis Expressing GBS 80 and Subsequent Challenge

[1665] This example describes a method of subcutaneous immunization mice using L. lactis that express GBS 80. Subcutaneous immunization consists of 3 doses at days 0, 14 and 28. Groups of 3 CD-1 outbred female mice 6-7 weeks old (Charles River Laboratories, Calco Italy) were injected subcutaneously with 10⁹ or 10¹⁰ CFU of the recombinant Lactococcus lactis suspended in 100 μl of PBS. In each immunization scheme, negative (wild-type L. lactis) and positive (recombinant GBS80) control groups were used. The immune response of the dams was monitored by using serum samples taken on day 0 and 49. The female mice were bred 2-7 days after the last immunization (at approximately t=36-37), and typically had a gestation period of 21 days. Within 48 hours of birth, the pups were challenged via I.P. with GBS in a dose approximately equal to an amount which would be sufficient to kill 90% of immunized pups (as determined by empirical data gathered from PBS control groups). The GBS challenge dose is preferably administered in 50 ml of THB medium. Preferably, the pup challenge takes place at 56 to 61 days after the first immunization. The challenge inocula were prepared starting from frozen cultures diluted to the appropriate concentration with THB prior to use. Survival of pups was monitored for 5 days after challenge.

### Example 20

### Immunization of Mice With GAS AI Polypeptides and Subsequent Intranasal Challenge

[1666] This example describes a method of immunizing mice with GAS AI polypeptides and subsequently intranasally challenging the mice with GAS bacteria. Groups of 10 CD1 female mice aged between 6 and 7 weeks are immunized with a combination of GAS antigens of the invention GAS 15, GAS 16, and GAS 18, (15 μg of each recombinant antigen, derived from M1 strain SF370) or L. lactis expressing the M1 strain SF370 adhesin island, suspended in 100 μl of suitable solution. Each group receives 3 doses at days 0, 21 and 45. Immunization is performed through subcutaneous or intraperitoneal injection for the GAS 15, GAS 16, GAS 18 protein combination. The protein combination is administered with an equal volume of Complete Freund's Adjuvant (CFA) for the first dose and Incomplete Freund's Adjuvant (IFA) for the following two doses. Immunization is performed intranasally for the L. lactis expressing the M1 strain SF370 adhesin island. In each immunization scheme negative and positive control groups are used.

[1667] The negative control group for the mice immunized with the GAS 15, GAS 16, GAS 18 protein combination included mice immunized with PBS. The negative control group for the mice immunized with L. lactis expressing the M1 strain SF370 adhesin island, included mice immunized with either wildtype L. lactis or L. lactis transformed with the pAM401 expression vector lacking any cloned adhesin island sequence.

[1668] The positive control groups included mice immunized with purified M1 strain SF370 M protein.

[1669] Immunized mice are then anaesthetized with Zoletil and challenged intranasally with a 25 μL suspension containing 1.2×10⁶ or 1.2×10⁸ CFU of ISS 3348 in THB Animals are observed daily and checked for survival.

### Example 21

### Active Maternal Immunization Assay

[1670] As used herein, an Active Maternal Immunization assay refers to an in vivo protection assay where female mice are immunized with the test antigen composition. The female mice are then bred and their pups are challenged with a lethal dose of GBS. Serum titers of the female mice during the immunization schedule are measured as well as the survival time of the pups after challenge.

### Mouse Immunization

[1671] Specifically, groups of 4 CD-1 outbred female mice 6-8 weeks old (Charles River Laboratories, Calco Italy) are immunized with one or more GBS antigens, (20 μg of each recombinant GBS antigen), suspended in 100 μl of PBS. Each group receives 3 doses at days 0, 21 and 35 Immunization is performed through intra-peritoneal injection of the protein with an equal volume of Complete Freund's Adjuvant (CFA) for the first dose and Incomplete Freund's Adjuvant (IFA) for the following two doses. In each immunization scheme negative and positive control groups are used.

[1672] Immune response is monitored by using serum samples taken on day 0 and 49. The sera are analyzed as pools from each group of mice.

### Active Maternal Immunization

[1673] A maternal immunization/neonatal pup challenge model of GBS infection was used to verify the protective efficacy of the antigens in mice. The mouse protection study was adapted from Rodewald et al. (Rodewald et al. J. Infect. Diseases 166, 635 (1992)). In brief, CD-1 female mice (6-8 weeks old) were immunized before breeding, as described above. The mice received 20 μg of protein per dose when immunized with a single antigen and 60 μg of protein per dose (15 μg of each antigen) when immunized with the combination of antigens. Mice were bred 2-7 days after the last immunization. Within 48 h of birth, pups were injected intraperitoneally with 50 μl of GBS culture. Challenge inocula were prepared starting from frozen cultures diluted to the appropriate concentration with THB before use. In preliminary experiments (not shown), the challenge doses per pup for each strain tested were determined to cause 90% lethality. Survival of pups was monitored for 2 days after challenge. Protection was calculated as (percentage deadControl minus percentage deadVaccine) divided by percentage deadControl multiplied by 100. Data were evaluated for statistical significance by Fisher's exact test.

### Example 22

### GBS 59 Isoforms Cross-Reactivity

[1674] In some instances GBS 59 polypeptides of different isoforms may be cross-reactive as well as GBS59 polypeptides of the same isoform may not be cross-reactive. In fact GBS 59 polypeptides are usually covalently linked in a macromolecular structure (i.e. the pilus), combined to other polypeptides such as GBS 67 and GBS 150, which show themselves some variability. Therefore the immunologic reactivity of such complex structures may not be predictable based on the sequence of single GBS 59 polypeptides. For instance in flow cytometry, where the readout is typically an average of different epitopes being recognized on these multimeric structures on the surface of the bacteria, some cross-reactivity is expected, even in the presence of different isoforms. Table 52 summarizes the results of experiments where three GBS 59 recombinant polypeptides from three different strains (CJB111, 515 and 2603) were used to immunize mice that were then challenged with homologous and heterologous strains. With the exception of 2603 strain, the protein is well expressed on the surface (i.e. the Δ-mean is greater than 200 channels) and confers protection against homologous challenge. In the case of mice immunized with the GBS 59^{CJB111} variant, the challenge with the heterologous strain 515 resulted in a low survival rate, confirming that the two polypeptides, although representing the same isoform, are not cross-protective in the animal model.

TABLE 52
GBS cross-reactivity.

| | | Protection | | | |
|---|---|---|---|---|---|
| | | GBS 59 | | | |
| Challenge | FACS | (Variant CJB111) | | PBS | |
| strain | (α-cjb111) | alive/ | | alive/ | |
| (serotype) | Δ-Mean | treated | % survival | treated | % survival |
| CJB111 (V) | 493 | 50/74 | 68 | 24/99 | 24 |
| 7357 B (Ib) | 596 | 30/54 | 56 | 7/40 | 17 |
| 515 (Ia) | 583 | 6/38 | 16 | 3/28 | 11 |
| | | Protection | | | |
| | | GBS 59 | | | |
| Challenge | FACS | (Variant 2603) | | PBS | |
| strain | (α-2603) | alive/ | | alive/ | |
| (serotype) | Δ-Mean | treated | % survival | treated | % survival |
| 3050 (II) | 570 | 37/40 | 92 | 5/29 | 17 |
| 18RS21 (II) | 380 | 12/30 | 40 | 1/40 | 2 |
| 2603 (V) | 186 | 15/78 | 19 | 16/75 | 23 |
| | | Protection | | | |
| | | GBS 59 | | | |
| Challenge | FACS | (Variant 515) | | PBS | |
| strain | (α-515) | alive/ | | alive/ | |
| (serotype) | Δ-Mean | treated | % survival | treated | % survival |
| 515 (Ia) | 583 | 24/43 | 56 | 6/53 | 11 |

### Example 23

### Pili are Immunogenic in Humans During Infection

[1675] Human sera from 9 patients diagnosed with pneumococcal disease were analyzed by FACS for their ability to recognize whole cell pneumococcal preparations of the serotype 4 S. pneumoniae strain TIGR4. All 9 sera were able to recognize TIGR4 bacteria, while a serum from a healthy donor did not produce appreciable positivity (FIG. 241A). To find out whether the antibodies induced during infection recognize pili, we tested the human sera by western blot against a TIGR4 pilus-enriched mutanolysin preparation, which in SDS-PAGE forms a typical ladder of high molecular mass pilus polymers. All 9 individual patient sera recognized the pilus ladder, while the serum from a healthy donor was negative (FIG. 241B). To investigate whether, in addition to the ladder, the human sera recognized the individual pilus subunits, a pool of sera from the 9 patients was tested by western blot against recombinant pilus subunits. RrgA and RrgB were recognized, while there was no detectable recognition of RrgC.

[1676] Serum antibodies against each of the three pilus subunits were quantified by ELISA, presenting marked differences in their relative abundance. The highest specific IgG level was directed against RrgB, followed by RrgA and RrgC (FIG. 241C). These results might reflect, at least in part, the relative abundance of the three subunits in the pilus, since RrgB, which constitutes the backbone, is the most abundant pilus component, followed by RrgA and RrgC (Barocchi 2006). Differential epitope exposure of the three subunits in the assembled native pilus could also contribute to preferentially direct the immune response to one subunit rather than another, a possibility that cannot be excluded and requires further investigation for clarification. In the healthy donor serum, very low but still measurable levels of specific IgG against pilus antigens were detected by ELISA (FIG. 241C). This may be reasonably ascribed to an immune response previously developed against S. pneumoniae by this subject. A larger study with sera from patients with pneumococcal disease and from healthy people could be used to identify the negativity threshold for ELISA detection of specific IgG against pilus antigens.

### Example 24

### Native and Recombinant Pilus Subunits are Immunogenic in Mice

[1677] Mice vaccinated with heat-inactivated TIGR4, containing native pilus structures, generated serum antibodies against recombinant pilus antigens, as evaluated by ELISA on sera obtained after the third immunization. The highest response was detected against the main pilus subunit RrgB , followed by RrgA and RrgC (FIG. 242), similarly to that observed for the human sera.

[1678] In order to find out whether such a difference in antibody response was due to the pilus structure or to the intrinsic immunogenicity of the pilus subunits, serum IgG response was also quantified by ELISA in mice that were immunized with recombinant pilus subunits (FIG. 242). Immunization with the individual recombinant pilus antigens (20 μg each) elicited high IgG response, sera becoming titrable at 1:50,000÷1:100,000 dilution, and the antibody titers to the three pilus subunits were comparable Immunization with the combination of RrgA+B+C also elicited high IgG levels against each of the three antigens, with titers slightly reduced, consistently with the lower antigen dose used (10 μg each) (FIG. 242). Specific IgG titers were undetectable in control groups (adjuvant plus saline).

[1679] When mice were immunized with the combined pilus antigens RrgA+B+C and Al(OH)₃ as an adjuvant, high IgG response was also induced, even though slightly lower than that obtained with Freund's adjuvant. These results indicate that each of the three pilus subunits has similar immunogenicity. Thus, the differences of IgG levels against each of the pilus subunits observed both in infected humans and in TIGR4-immunized mice should be most likely ascribed to the composition and structure of the native pilus.

### Example 25

### Immunization With Recombinant Pilus Antigens is Protective in Mice

[1680] Mice were immunized intraperitoneally with recombinant pilus antigens, alone or in combination, then challenged intraperitoneally with 10² CFU of TIGR4 per mouse, a dose previously observed to cause high levels of bacteremia 24 h post-challenge and early death in naïve mice. Bacteria in the blood were quantified 24 h post-challenge. As shown in FIG. 243, in this model, control animals, receiving adjuvant plus saline, had a geometric mean of >10⁴ CFU/ml, including 7 mice with >10⁶ CFU/ml and 5 mice with no detectable bacteremia (FIG. 243A); 9 out of 16 mice did not survive at 10 days (FIG. 243B). In marked contrast, no bacteremia was detected in any of the mice vaccinated with the whole TIGR4 bacteria (FIG. 243A), and all mice of this group were alive at 10 days (FIG. 243B). All groups of mice vaccinated with recombinant pilus antigens showed lower bacteremia and increased survival, as compared with the control groups receiving adjuvant plus saline. The best efficacy was shown by RrgB, which afforded a protection similar to the whole TIGR4 bacteria, with only 1/8 mice bacteremic and 100% survival at the endpoint. The groups vaccinated with RrgA or with the combination RrgA+B+C also resulted protected, with only 1/8 mice bacteremic and 7/8 mice surviving challenge in each group. Finally, the mice vaccinated with RrgC showed only limited protection. Both in terms of bacteremia and survival, all groups immunized with pilus antigens gave results not statistically different (P>0.1) from those of the group vaccinated with heat-inactivated TIGR4, which resulted completely protected. The combination RrgA+B+C showed similar protective efficacy when Freund adjuvant was replaced by Al(OH)₃ (FIG. 243).

[1681] Interestingly, in vaccinated groups, infection and death correlated with low specific antibody titers against the three pilus subunits, suggesting the relevance of antibody response in the observed protection.

[1682] In order to further investigate whether the protective efficacy of pilus subunits is antibody-dependent, we tested mouse antisera raised against recombinant pilus antigens for their protective ability by passive transfer. Immune sera were intraperitoneally injected in mice prior to challenge with 10² CFU of S. pneumoniae TIGR4 per mouse. As shown in FIG. 243A, 24 h post-challenge, control animals presented a geometric mean of >10⁵ bacteria per ml of blood, with 10/16 mice having values >10⁵ CFU/ml, one mouse <10⁵ CFU/ml, and 5 mice with no detectable bacteremia. Ten days post-challenge, 8/16 control mice were still alive (FIG. 243B). All 8 mice receiving anti-TIGR4 serum presented undetectable bacteremia and survived at 10 days (FIG. 243B). All groups that received antisera against recombinant pilus antigens showed reduced bacteremia and increased survival time, as compared with the control group.

[1683] The passive transfer of anti-RrgA+B+C serum resulted in undetectable bacteremia at 24 h (FIG. 243A) and survival at the endpoint (FIG. 243B) for all 8 mice. Also, after passive transfer of either anti-RrgA or anti-RrgB serum, only 1 and 2 mice, respectively, were found bacteremic 24 h post-challenge (FIG. 243A), and 8/8 mice in each group survived lethal challenge (FIG. 243B).

[1684] Finally, passive transfer of anti-RrgC serum resulted in 5/8 mice with no detectable bacteremia (FIG. 243A), and 7/8 mice survived challenge (FIG. 243B). Similarly to that obtained with active immunization, all groups that received antisera raised against pilus antigens showed bacteremia and survival not statistically different (P>0.1) from those of the group that received anti-TIGR4 antiserum, which resulted completely protected. These results indicate that antibodies play a relevant role in the protective effect these antigens elicit.

[1685] The observation that, both by active and passive immunization, RrgA and RrgB are much more effective than RrgC in protecting mice against lethal challenge, even though all three antigens elicit comparable specific antibody titers, can be explained also in this case by the different relative abundance of these antigens in the native pilus. In fact, the efficacy of high antibody titers to RrgC can be hampered by the relatively low availability of their target in the infecting bacteria, that is not the case for the more abundant RrgB and RrgA.

[1686] Moreover, passive transfer of mouse immune serum raised against RrgA+B+C_{6B} was able to protect mice against heterologous challenge with 10² CFU of TIGR4. All 8 mice receiving anti-RrgA+B+C_{6B} antiserum were not bacteremic 24 h post-challenge and were still alive at 10 days. (FIG. 243) These preliminary results suggest the possible cross-protective ability of pilus subunits against different S. pneumoniae serotypes.

[1687] FIG. 254 demonstrates that that passive transfer of antisera to TIGR4 native pilus protects against TIGR4 challenge.

[1688] These examples provide evidence that the three S. pneumoniae pilus subunits, RrgA, RrgB and RrgC, are naturally immunogenic, and that immunization of mice with the three recombinant proteins elicits high antibody titers. Both active immunization with the three recombinant pilus components and passive transfer of antisera against these antigens is protective in mice against subsequent lethal challenge, RrgB and the combination of RrgA+B+C showing the best overall efficacy, followed by RrgA and RrgC. Although pilus structures are not universal in pneumococcal strains, the ability of the pilus recombinant proteins to protect mice against infection suggests their use as potential components of a multi-protein vaccine as an alternative capsule-independent strategy to protect against S. pneumoniae.

### Example 26

### Cloning, Expression and Purification of RrgA, RrgB and RrgC (Examples 23-25)

[1689] Standard recombinant techniques were used for nucleic acid cloning and restriction analyses. Briefly, genomic DNA from TIGR4 S. pneumoniae strain was prepared using the Wizard genomic DNA purification Kit (Promega). PCR was carried out with Expand High fidelity PCR system (Roche) according to the manufacturer's instructions. Primers were as follows:

rrgA:

(SEQ ID NO: 467)

5′-AGTTGCTGCTAGCGAAACGCCTGAAACC-3′ (forward),

(SEQ ID NO: 468)

5′-CAGTTCGCTCGAGTTCTCTCTTTGGAGG3′ (reverse);
rrgB:

(SEQ ID NO: 469)

5′-GTGCGTGCTAGCGCTGCAACAGTTTTTGCGGCTGGG-3′
(forward),

(SEQ ID NO: 470)

5′-CAGCGTCTCGAGAGTGATTTTTTTGTTGACTACTTT-3′
(reverse);
rrgC:

(SEQ ID NO: 471)

5′-GTGCGTGCTAGCCATGCAGTCCAAGCGCAAGAAGAT-3′
(forward),

(SEQ ID NO: 472)

5′-CAGCGTCTCGAGATCAATCCGTGGTCGCTTGTTATT-3′
(reverse).

[1690] The amplification products were purified, digested with the appropriate enzymes (NdeI and XhoI) and ligated in a His6 expression vector, pet21b+ (Novagen). The resulting plasmids were introduced into E. coli DH5α for sequence analysis and in E. coli strain BL21 star (DE3) for protein expression.

[1691] IPTG-induced recombinant E. coli cultures, expressing His-tagged RrgA, RrgB and RrgC proteins, were harvested and subjected to lysis by lysozyme in a BugBuster (Novagen), Benzonase Nuclease (Novagen) solution containing proteinase inhibitors. After centrifugation at 100,000 rcf for 1 h at 4° C., the soluble fraction was subjected to metal chelate affinity chromatography on His-Trap HP columns (GE Healthcare) equilibrated and eluted according to manufacturer's instructions. Purity was evaluated by scanning densitometry of Coomassie Blue-stained SDS-PAGE: fractions corresponding to >90% purity were used. Pooled fractions were dialysed overnight against 0.9% NaCl and stored at −80° C. until further use. Protein concentration was determined by scanning densitometry of Coomassie Blue-stained SDS-PAGE using a BSA standard and measuring Absorbance at 280 nm of the protein solution (NanoDrop).

[1692] Bacterial culture. Bacteria were grown at 37° C. under 5% CO₂ on Tryptic Soy Agar (Becton Dickinson) with 5% sheep blood, inoculated into Tryptic Soy Broth (Becton Dickinson), and further cultured until reaching OD₆₀₀=0.2 (=10⁷ CFU/ml).

[1693] Protein expression and purification. Genomic DNA was prepared from TIGR4 or 6B strains using the Wizard Genomic DNA Purification Kit (Promega). PCR was done with Expand High Fidelity PCR System (Roche). Primers are listed in Table 1. PCR products were digested with NdeI and XhoI (New England Biolabs), ligated in pET21b+ (Novagen), and the plasmids introduced into E. coli BL21 Star (DE3). Soluble recombinant pilus subunits corresponding to the sequence of TIGR4 (RrgA, RrgB, RrgC) or 6B (RrgA_{6B}, RrgB_{6B}, RrgC_{6B}) were purified by His-Trap HP (GE Healthcare). Protein purity and concentration were determined by SDS-PAGE scanning densitometry.

[1694] Mice and study design. Animal experiments were done in compliance with the current law. Six-week-old specific-pathogen-free female BALB/c mice (Charles River) were immunized intraperitoneally (i.p) on day 0, 14 and 28 with RrgA, RrgB, RrgC (20 μg), a combination RrgA+B+C or RrgA+B+C_{6B} (10 μg each), or heat-inactivated bacteria (10⁸ CFU), along with Freund's adjuvant. The combination RrgA+B+C was also given i.p. on day 0, 10 and 20, with 200 μg Al(OH)₃. Controls received an identical course of saline plus the adjuvant. Two weeks after the last immunization, each mouse was i.p. challenged with 10² CFU of TIGR4 (LD₁₀₀ in naïve mice). For passive immunization, 10-week-old mice received i.p. 50 □l of pooled mouse immune sera 15 min before lethal challenge with TIGR4 as above or with 10⁶ CFU of 6B. Bacteremia was quantified at 24 (TIGR4) or 5 h (6B), and the survival monitored for 10 days (TIGR4) or 15 days (6B) post-challenge.

[1695] FACS Analysis. TIGR4 bacteria were incubated on ice for 30 min with human sera diluted 1:50. Antibody binding was revealed by FITC-labeled anti-human IgG (Jackson ImmunoResearch) and samples analyzed by FACSCAN (Becton Dickinson).

[1696] Western blot. TIGR4 mutanolysin preparation was run on 3-8% NuPage Novex Bis-Tris Gel (Invitrogen) and blotted onto 0.45 μm nitrocellulose. Human sera were added at 1:3,000 dilution followed by alkaline-phosphatase conjugated anti-human IgG (Promega). Immunoreactive bands were visualized by the Western Blue Stabilized Substrate (Promega).

[1697] ELISA. Serial dilutions of human or mouse sera were dispensed in Maxisorp 96-well plates (Nalge Nunc Int.) coated with recombinant RrgA, RrgB or RrgC 0.2 μg/well. Antibody binding was revealed by alkaline phosphatase-conjugated anti-human (Sigma) or anti-mouse (Southern Biotechnology Ass.) IgG, followed by p-nitrophenyl-phosphate (Sigma). Absorbance was measured at 405 nm. Mouse sera were titrated using a reference line calculation program, by comparison with the reference curves. Reference consisted of pooled anti-RrgA, -RrgB or -RrgC mouse sera, which tested by ELISA at 1:100,000 dilution gave similar A₄₀₅ values, and to which the titer of 50,000 was assigned.

[1698] Statistics. Data were evaluated by one-tailed Mann-Whitney U test. P values <0.05 were considered and referred to as significant.

### Example 27

### Pilus Like Structures Promote Cell Auto Aggregation and Biofilm Formation in Group A Streptococcus pyogenes (GAS)

[1699] Bacterial Strains, Media, and Growth Conditions. GAS M1 strain SF370 was provided by University of Siena, Italy. Wild-type and mutant strains were grown at 37° C. or 30° C. in Todd-Hewitt medium supplemented with 0.5% yeast extract (THY) (Difco), or THY agars supplemented with 5% defibrinated sheep blood. L. lactis subspecies cremoris MG1363 was grown at 30° C. in M17 (Difco) supplemented with 0.5% glucose (GM17). 20 μg/ml chloramphenicol was used in selective medium.

[1700] Construction of GAS deletion mutants and complementation. In-frame deletion and complementation mutants of GAS strain SF370 were constructed as described before (Mora et al., 2005). Briefly, mutations were constructed by using splicing-by-overlap-extension PCR (Horton, et al., 1990). The PCR deletion construct was cloned in the temperature-sensitive allelic exchange vector pJRS233, and transformation and allelic exchanges were performed as described in (Frameson et al., 1997; Caparon and Scott 1991 and Perez-Casal et al., 1993). Transformants were selected on THY plates with 1 μg/ml erythromycin (Sigma) at 30° C. Drug-sensitive colonies were screened and deletions were confirmed by PCR assay. The complementation vectors pAM401::128 and pAM401::129 were constructed with the appropriate primers to amplify the fragment that includes the spy0128 or spy0129 gene, the predicted promoter and the P-independent terminator.

[1701] L. lactis transformation with GAS pilus region. The complementation vector pAM401::pilM1 was constructed with the appropriate primers to amplify the fragment that includes the genomic region comprised between spy0126 to spy0130. The fragment was cloned in the pAM vector containing the promoter and terminator regions of GBS adhesin island-2 (Buccato et al., 2006). The vector was then inserted in L. lactis MG1363 competent cells by electroporation, and the transformants were selected on GM17 plates with 20 μg/ml chloramphenicol. Drug-resistant colonies were screened by PCR. The expression of pilus subunits and their assembly into a covalently bound polymeric structure was confirmed by western blot analysis, using polyclonal sera obtained from mice immunized with the corresponding GAS pilus proteins.

[1702] Immunoblots on bacterial cell-wall fractions. Bacterial cell-wall fractions were prepared as described previously. In particular, bacteria grown in THY to OD₆₀₀=0.4 at 37° C. were pelleted, washed once in PBS, suspended in 1 ml of ice-cold protoplasting buffer [40% sucrose; 0.1 M KPO4, pH 6.2; 10 mM MgCl2; Complete EDTA-free protease inhibitors (Roche); 2 mg/ml lysozime; 400 units of mutanolysin (Sigma)] and incubated at 37° C. for 3 h. After centrifuging at 13,000×g for 15 min, the supernatants (cell-wall fractions) were frozen at −20° C.

[1703] Cell-wall preparations were then separated by 3-8% gradient gels (NuPAGE Tris-acetate gels, Invitrogen) and transferred to nitrocellulose membranes (Bio-Rad) for immunoblot analysis with mouse polyclonal antisera at a 1:500 dilution obtained as described before (Mora et al., PNAS2005) and ECL enhanced chemiluminescence detection (SuperSignal West Pico chemiluminescent substrate, Pierce). The secondary antibody (ECL, horseradish-peroxidase-linked anti-mouse IgG, GE Healthcare) was used at a 1:5,000 dilution.

[1704] Electron Microscopy. GAS was grown on THY blood agar plates and resuspended in PBS. Formvar-carbon-coated nickel grids were floated on drops of bacterial suspensions for 5 min, fixed in 2% PFA for 5 min, and placed in blocking solution (PBS containing 1% normal rabbit serum and 1% BSA) for 30 min. The grids were then floated on drops of primary antiserum diluted 1:20 in blocking solution for 30 min at RT, washed, and floated on secondary antibody conjugated to 10 nm gold particles diluted 1:10 in 1% BSA for 30 min. Bacteria were then fixed again for 10 min. The grids were washed with PBS then distilled water and air dried and examined using a TEM GEOL 1200EX II transmission electron microscope. Preimmune serum from the same animals were used as a negative control.

[1705] Light microscopy. L. lactis was grown in GM17 to mid-log phase. 20 μl of bacterial suspension was placed on a glass slide, covered with a coverslip and observed with a Bio-Rad confocal scanning microscope.

[1706] Confocal microscopy. GAS aggregation was observed by confocal laser scanning microscopy (CLSM). In particular, approximately 2×10⁸ bacteria grown to OD₆₀₀=0.2 were seeded in 12-well plates containing sterile glass cover-slips coated with poly-lysine and were left growing upon the cover-slips up to the late exponential phase, when aggregation reaches a maximum. Samples were then fixed with paraphormaldeyde 2.5% for 15 minutes, washed with PBS and blocked for 15 minutes. Then samples were incubated with primary antibodies (rabbit-anti-GAS and mouse-anti-spy0128) for 1 h at RT, washed in blocking solution and incubated for 30 minutes at RT with secondary antibodies: Alexa Fluor dye 647 goat anti-rabbit and Alexa Fluor dye 568 goat anti-mouse (Molecular Probes). Cover-slips were then washed with blocking solution and mounted on glass slides with the Slow Fade reagent kit (Molecular Probes) containing 4_{—},6_-diamidino-2-phenylindole dihydrochloride before they were viewed on a Bio-Rad confocal scanning microscope.

[1707] For aggregation on eukaryotic cells surface, 2×10⁵ Detroit-562 cells were seeded on glass cover-slips coated with polylysine in 12-well plates. The day after 5×10⁸ bacterial cfu of each strain from a logarithmic growth were extensively pipetted to break possible aggregates and used to infect mono-layers at 37° C. in a 5% CO2 atmosphere. After 15 minutes cells were washed 3 times with PBS to remove the unattached bacteria, and infection was let continue to 30, 60 and 120 minutes. Samples were then washed again, fixed, blocked and stained with rabbit-anti-GAS as a primary antibody and Alexa Fluor dye 488 goat anti-rabbit (Molecular Probes) as a secondary antibody. Cells were stained with phalloidin conjugated with Alexa Fluor dye 647 (Molecular Probes). Mounting and viewing were performed as already described.

[1708] For each strain of bio-film used in CLSM studies, a 1:10 dilution of an overnight culture in C-medium (Lyon et al., 1998) at 37° C. was inoculated at RT on poly-lysine coated glass sterile cover-slips positioned in 50 ml falcon containing 10 ml of fresh C medium, as described elsewhere (Cho and Caparon, 2005). Five ml of C medium were replaced every 24 hours and preparations were collected after desired time points of growth (24, 48 and 72 hours). Samples were then fixed, blocked and stained with rabbit-anti-GAS and mouse-anti spy0128 as primary antibodies and Alexa Fluor dye 647 goat anti-rabbit and Alexa Fluor dye 568 goat ant-mouse as secondary antibodies (Molecular Probes). Exopolysaccharides (EPS) were stained by the FITC-conjugated lectin Concanavalin A (Sigma). Mounting and viewing were performed as already described. Three-dimensional immunofluorescence images were reconstructed from 0.5-μm confocal optical sections by using VOLOCITY 3.5 (Improvision, Lexington, Mass.).

[1709] Bio-film formation assay. For each strain, a 1:10 dilution of an overnight culture in C-medium ( ) at 37° C. was inoculated in 1 ml of fresh medium in 24-well plates in triplicate. Plates were incubated at room temperature for 16-24-48-72 h, changing medium every 24 h. At each time point, the medium was removed and adherent bacteria were stained with crystal violet (0.2% in distilled water) by incubating at room temperature for 10 minutes. Crystal violet was then eluted with 1% SDS and bio-film formation was quantified by measuring the optical density at 540 nm.

[1710] Eukaryotic cell cultures. The human pharynx carcinoma cell line Detroit-562 (ATCC CCL-138) was cultured in Dulbecco's modified Eagle's medium (EMEM; Life Technologies Gibco BRL) supplemented with 10% FCS (Life Technologies) and 5 mM glutamine (Life Technologies) at 37° C. in an atmosphere containing 5% CO₂. For adherence assays, cells were resuspended at a concentration of approximately 3×10⁵ cells/ml in EMEM, and seeded into 24-well tissue culture plates (Nunc), which were then incubated for 24 h. For microscopic assays, approximately 6×10⁵ cells/ml were seeded onto 12-mm-diameter glass coverslips placed on the bottom of 24-well tissue culture plates.

[1711] Adherence assay. Bacteria from exponential phase cultures were collected by centrifugation (3000×g, 5 min), resuspended in conditioned EMEM and used to infect Detroit 562 cells monolayers for 5, 15, 30 and 120 min at 37° C. in a 5% CO₂ atmosphere. A Multiplicity of Infection (MOI) of 100:1 (for GAS strains) or 10:1 (for L. lactis strains) were used. After infection, the wells were extensively washed with PBS to remove unattached bacteria, incubated with 1% saponin to lyse eukaryotic cells, and adherent bacteria were plated for enumeration. Adherence results were expressed as the average number of bacteria recovered per ml for three independent determinations in a single assay and the percentage of adherence was calculated using the following equation: bacteria recovered after infection (cfu/ml)/bacteria inoculated (cfu/ml)×100. Tests were repeated at least three times and results are expressed as the averages+SD of three experiments performed in triplicate.

[1712] Statistics. T student test was used to compare biofilm formation and cell adhesion of wild type and mutant strains. Data with p value <0.05 were reported as statistically significative.

### Pilus Dependent Bacterial Aggregation During In Vitro Growth

[1713] We previously showed that S. pyogenes can display pilus-like structures on their surface and that pili and their assembly machinery are encoded in a 11 kb highly variable pathogenicity island known as the fibronectin binding, collagen binding, T-antigen (FCT) region (Mora et al., 2005). In the transformable strain M1_SF370, the genes for the three pilin components and the sortase enzyme involved in pilus assembly are located in the FCT-2 variant region. In frame deletion of either the pilus backbone encoding gene (M1_{—}128) or the C1 sortase (M1_{—}129) resulted in abolished polymerization of all three pilin proteins, whereas the respective complemented strains produced again pili (FIG. 248).

[1714] As a first step to investigate the phenotype of the two GAS derivatives unable to form pili, in vitro growth of the two mutants was compared to wild-type. When SF370 was grown in liquid medium, it started forming large visible aggregates from the early exponential growth phase, which progressively precipitated to the bottom of the tube. Although their growth rate was unaffected, the two mutant strains remained in solution for a longer period. This observation led us to further investigate whether pili could be involved in self-aggregation of bacteria. Using Confocal Laser Scanning Microscope (CLSM) we observed the vast aggregates formed by wild type SF370 grown to exponential phase and double labeled with sera raised against whole GAS bacteria and with Spy128 purified recombinant protein (FIG. 249A). Conversely, ΔSPy128 and ΔSpy129 mutants were not stained with anti-Spy128 and they formed only the typical streptococcal chains without any or very low aggregation (FIGS. 249B and C). Plasmid mediated complementation resulted in a partially restored capacity to self aggregate, even if not all the bacteria were labeled with anti-Spy 128, perhaps due to plasmid instability (FIGS. 249D and E).

[1715] To further test whether pili could per se be responsible of the self-aggregating phenotype, we introduced the five genes involved in GAS SF370 pilus formation into L. lactis, a non pathogenic Gram-positive microorganism which does not form aggregates during growth. Lactococcal bacteria, already shown to correctly assemble pili from Streptococcus agalactiae (Buccato et al., 2006), expressed and assembled the GAS pilin proteins in a covalently bound polymerized structure, as could be inferred from the high molecular weight pattern visible in immunoblots (FIG. 248). As hypothesized, light microscopy analysis (FIG. 249F-G) revealed that L. lactis bearing the M1 pilus region acquired the capacity to form aggregates, whereas the strain transformed with the vector alone failed to show any aggregation phenotype, strongly suggesting an involvement of the pilus region in inter bacterial attachment.

### GAS Association to Human Pharyngeal Epithelial Cells is Dependent on the Presence of Pili

[1716] To evaluate whether the in vitro observed aggregation phenomenon could be similar to the behavior of bacteria during adhesion to host cell epithelia, we co-cultured SF370 wild type, ΔSPy128 and ΔSPy129 strains with the human pharynx cell line Detroit-562 and observed bacteria adhering to cells by confocal microscopy. In particular, 5×10⁸ bacterial cfu from a logarithmic growth were extensively pipetted to break possible aggregates and used to infect mono-layers of approximately 2×10⁵ Detroit-562 cells. After 15 minutes cells were thoroughly washed to eliminate loose-adherent bacteria and infection continued up to 30, 60 and 120 min. As shown in FIG. 250 A-D, after 30 minutes the wild type strain started forming aggregates which specifically adhered to the cell surface and became larger during longer incubation times. Conversely the two mutant strains, although adhering to cells, started forming aggregates only after 1-2 hours of infection. This suggests an involvement of GAS pili in concentrating large numbers of bacteria to the epithelial layers during the initial stages of colonization (FIGS. 250E-H and I-N).

[1717] The results were confirmed by performing a classical adhesion assay in which a confluent cell monolayer was infected with 10⁸ thoroughly pipeted bacteria or its isogenic mutants ΔSPy128 and ΔSpy129 and the number of adhering bacteria after 5, 15, 30 and 120 minutes of infection was measured after extensive washing. Bacterial growth was checked by counting the total number of cfu in parallel wells and was found to be equivalent in all strains. As shown in FIG. 251A-B, the number of bacteria associated to cells was significantly lower for the two mutant strains compared to wild type after 30 and 120 minutes but also at shorter times, indicating a delay in initial adhesion as well as a slower formation of cell-associated aggregates as already described in confocal microscopy experiments. These data suggest that, like Type IV pili in V. cholerae, GAS pili contribute to cell adherence both by mediating micro-colony formation and by acting as a ligand for early binding to a surface exposed epithelial cell receptor.

[1718] The role of pili in adherence to epithelial cells was confirmed in a new adhesion assay in which 10⁷ cfu of L. lactis harboring either the GAS M1 pilus island or the recipient strain transformed with the plasmid vector as control, were co-cultured with Detroit-562 cells and adherent bacteria were counted after 15 and 120 minutes. As shown in FIG. 251C, the acquisition of the pilus island strongly increased L. lactis adhesion to epithelial cells both after 15 and 120 minutes, thus further confirming the involvement of GAS M1 pili in cell adhesion. All these data strongly suggest that pili facilitate the early stages of GAS cell adhesion to pharyngeal eukaryotic cells, probably by means of the adhesin proteins of which they are composed.

### GAS SF370 Pili are Involved in the Cell Surface Interaction Required for Bio-Film Formation

[1719] Many bacteria, including S. pyogenes aggregate during growth and form micro colonies which further develop into bio-film structures (reviewed in Hall-Stoodley et al., 2004). To investigate whether the described self-aggregation mediated by pili was instrumental to bio-film development, we performed a classical bio-film plate assay. Bacteria were incubated at room temperature in C medium in 24-well plates, and stained with crystal violet. A preliminary study indicated that GAS SF370 fully attached to polystyrene surfaces in 16 to 24 hours, whereas adhesion diminished after 48 and 72 hours. Based on these data, the capacity of wild type and its mutants to form bio-film was compared after 24 hour incubation.

[1720] As shown in FIG. 252, wild type bacteria formed significantly more bio-film than mutants unable to form pili (p val <0.025). Moreover, when Spy128 and Spy129 genes were again introduced in the mutant strains, we observed a partially restored bio-film forming ability (p val <0.05). The number of cfu after 24 hour growth was equivalent in all strains. These data clearly demonstrate that a non polar deletion of pili considerably impairs bio-film formation.

### Pili Affect Biofilm Maturation

[1721] Bio-film assay on plates detects primarily the initial cell-surface interactions required for bio-film formation (O'Toole et al., 2000). To analyze subsequent stages of bio-film maturation wt, ΔSPy128, ΔSPy129 and their complemented strains ΔSPy128(pAM128) and ΔSPy129(pAM129) were grown on poly-lysine coated glass cover-slips, double labeled with anti GAS and anti Spy128 sera and examined by confocal microscopy. After 72 hours the bio-film formed by the wild-type strain showed an average thickness of 10.8 μm while the two mutants attached to the glass surface but failed to form a significant multilayered structure and thus a mature bio-film (three dimensional and multilayered) (FIG. 253). On the other hand the complemented strains ΔSPy128(pAM128) and ΔSPy129(pAM129) produced 11.8 μm and 4.5 μm thick bio-films respectively. Furthermore, wt and complemented bacteria were able to produce the extra cellular saccharides that most bacterial cells secrete during bio-film development (EPS), stained in green by the lectin Concanavalin A labeled with FITC, whereas very low amounts of EPS could be detected in the mutant strains (FIG. 253).

### Example 27

### Pili Genomic Islands are Ubiquitous in Clinical Isolates of Streptococcus agalactiae: a Basis for a Broadly Protective Vaccine

[1722] In this example, we provide a thorough analysis of the distribution of the three pilus-like genomic islands among 289 clinical isolates of GBS collected at distant geographic sites. Moreover, sequence variability of the PI genes coding for the three structural proteins of each pilus has been determined for 186 isolates. This example has led to the definition of a combination of three antigens, one for each pilus island, that could form the basis for a broadly protective vaccine.

[1723] Bacterial strains and growth conditions. Streptococcus agalactiae (GBS) isolates used in this work were collected from patients with invasive GBS infections and asymptomatic colonization. The isolates came from three collections: the Center for Disease Control and Prevention (CDC), Atlanta, Ga. (2000 to 2003); Baylor College of Medicine (BCM), Houston (2002 to 2005) and Istituto Superiore di Sanità, Italy (1992 to 2006). Serotyping of isolates at CDC and BCM used the capillary precipitin method of Lancefield. GBS strains 2603 V/R (capsular serotype V), 515 (Ia), CJB111(V), H36B(Ib), COH1(III), used as source of DNA for amplification of pili genes, were a gift from Dr. Dennis Kasper (Harvard Medical School, Boston, USA). Bacteria were grown at 37° C. in Todd Hewitt Broth (THB; Difco Laboratories) or in trypticase soy agar supplemented with 5% sheep blood.

[1724] DNA isolation. Genomic DNA was prepared by a standard protocol for gram-positive bacteria using a NucleoSpin Tissue kit (Macherey-Nagel) according to the manufacturer's instructions. In brief, GBS isolates were grown in 10 ml of THB medium to OD600 nm 0.5. The culture was centrifuged for 10 min. at 3000 rpm, the cell pellet was resuspended in 180 μl of lysis buffer containing 20 mM Tris pH 8.0, 2 mM EDTA, 1% Triton X-100, 1 mg lysozyme (Sigma), 50 units of mutanolysin (Sigma) and incubated for 1 h at 37° C. Then 25 μl of Proteinase K (20 mg/ml) was added and samples were incubated at 56° C. for at least 1 h. When a complete lysis was obtained, 10 μl of RNase A (20 mg/ml) were added and samples were incubated for an additional 10 min at 56° C. The DNA from the bacterial clear lysates was isolated using NucleoSpin Tissue columns and eluted in sterile water.

[1725] PCR amplification and DNA sequencing. Genes were amplified using primers external to the coding sequence. The primers are listed in Table VII. Each PCR reaction was performed in 100 μl containing 100 ng of GBS chromosomal DNA, 50 μM of each primer, 200 □M of each dNTP and 0.5 U of Pwo DNA polymerase (Roche) in 1× buffer with 1.5 mM MgCl2. The reaction conditions for denaturation were 94° C. for 5 min., followed by 30 cycles (denaturation at 94° C. for 30 sec, primer annealing at 55° C. for 45 sec and extension at 72° C. for 1-2 min.). The nucleotide sequences of PCR products were determined using a BigDye Terminator V3.1 Cycle Sequencing kit (Applied Biosystem) in an ABI PRISM 3700 DNA Analyzer (Applied Biosystem).

[1726] Sequence Alignments and Phylogenetic Analysis. The percentage of sequence identity was calculated by pair wise BLAST with the VECTOR NTI SUITE 9 for PC (Informax, Bethesda), with gaps included. Protein alignments were performed by using the program CLUSTAL W (1.83) included in the GCG Wisconsin Package version 11.1. Phylogenetic trees were inferred from the protein alignments by the neighbour-joining-distance-based method and bootstrapped 1,000 times. The complete genome sequences of Streptococcus agalactiae strain 2603V/R (V), A909 (Ia) and NEM316 (III) are available under accession numbers AE009948, CP000114, AL732656. The genome sequences in assembly of strains 18RS21 (II), 515 (Ia), CJB111 (V), H36B (Ib) and COH1 (III) are available under accession numbers AAJO00000000, AAJP00000000, AAJQ00000000, AAJS00000000, AAJR00000000.

[1727] Cloning, expression and purification of recombinant proteins. Recombinant proteins were expressed in E. coli BL21DE3 cells (Novagen) as 6His-tagged fusion proteins by cloning the corresponding genes in pET24b+ (Novagen) and purified by affinity chromatography as previously reported (22). GBS strain 2603 V/R (serotype V) was used as source of DNA for cloning the sequences coding for the PI-1 proteins (TIGR annotation SAG0645, SAG0646, SAG0649) and the PI-2a LPXTG proteins (TIGR annotation SAG1408, SAG1407, SAG1404). GBS strain 515 (Ia) and GBS strain CJB111 (V) were used for cloning the sequences coding for the corresponding PI-2a backbone protein (TIGR annotation SAL1486, SAM1372) and GBS strain H36B (Ib) for the amplification of the gene coding for the PI-2a ancillary protein 1 (TIGR annotation SAI1512). GBS strain COH1 (III) was used for cloning the genes coding for the PI-2b proteins (TIGR annotation AP1-2b, BP-2b and AP2-2b). Primers were designed to amplify the coding regions without the signal peptide sequence and the 3′ terminal sequence starting from the region coding for the LPXTG motif.

[1728] Mouse immunization. Purified recombinant GBS proteins were used for intraperitoneal immunization of groups of 6- to 8-week-old CD-1 outbred mice (Charles River Laboratories, Calco, Italy). 20 μg of each protein was administered to mice on days 1 (emulsified in Complete Freund's adjuvant, CFA), 21 and 35 (in Incomplete Freund's adjuvant, IFA). Sera from each group of mice were collected on days 0 and 49, and the protein-specific immune response (total Ig) in pooled sera was monitored by ELISA.

[1729] Flow cytometry. Exponential phase grown GBS strains were resuspended in PBS containing 0.05% paraformaldehyde, and incubated for 1 h at 37° C. and then overnight at 4° C. Fixed bacteria were then washed once with PBS, resuspended in Newborn Calf Serum (Sigma) and incubated for 20 min. at room temperature. The cells were then incubated for 1 h at 4° C. in pre-immune or immune sera, diluted 1:200 in dilution buffer (PBS, 20% Newborn Calf Serum, 0.1% BSA). After centrifugation and washing in PBS/0.1% BSA, samples were incubated for 1 h at 4° C. with R-Phycoerythrin conjugated F(ab)2 goat anti-mouse IgG (Jackson ImmunoResearch Laboratories; Inc.), diluted 1:100. After washing, cells were resuspended in PBS. Samples were acquired by a FACS Calibur apparatus (Becton Dickinson, Mountain View, Calif.) and data were analyzed using the Cell Quest Software (Becton Dickinson). In the case of API-1, to avoid cross-reactive binding of polyclonal sera, a pool of four monoclonal antibodies raised against the protein was used instead of mouse immune serum; a pool of two unrelated monoclonal antibodies was used as a control. To analyze the surface exposure of the PI-2a backbone protein, antisera specific for the 2603, 515 and CJB111 variants were used. Data are expressed as the difference in fluorescence between cells stained with immune sera versus pre-immune sera.

[1730] Active mouse maternal immunization. A maternal immunization/neonatal pup challenge model of GBS infection was used to verify the protective efficacy of the antigens in mice, as previously described (11). In brief, CD-1 female mice (6-8 weeks old) were immunized on days 1 (in CFA), 21 and 35 (IFA) with either PBS or 20 μg of protein per dose when immunized with a single antigen or 60 μg of protein per dose (20 μg of each antigen) when immunized with a combination of antigens. Mice were bred 3 days after the last immunization. Within 48 h of birth, pups were injected intraperitoneally with a dose of GBS bacteria calculated to cause 90% lethality. Survival of pups was monitored for 2 days after challenge. Protection was calculated as (percentage deadControl minus percentage deadVaccine) divided by percentage deadControl multiplied by 100. Statistical analysis was performed using Fisher's exact test.

[1731] Genomic islands coding for pilus-like structures are always present in clinical isolates of GBS. A total of 289 isolates of invasive and colonizing GBS collected at three centers (CDC, BCM and Istituto Superiore di Sanità, Italy) (Table I) were analyzed for the presence, sequence variability and surface exposure of the three structural components of GBS pili. Two loci have been identified in the genome of GBS strains that can harbor pilus encoding islands. Genes associated with the first locus, pilus island 1 (PI-1), are conserved and present in six of the eight GBS genomes sequenced (12).The second locus is occupied by either of two variants of pilus island 2, PI-2a and PI-2b, that show only limited similarity at the sequence and gene organization levels (13).

[1732] Screening by PCR for the presence of the genes coding for the structural components of GBS pili indicated that all 289 strains contained at least one of the pilus island regions (Table II). The PI-1 locus was present in 208 (72%) strains and was always associated with the presence of a PI-2a or PI-2b allele at the second genomic region containing a pilus island. Therefore, while the genomic region at the first locus was empty in 28% of the strains, the second locus contained PI-2a/b in all GBS isolates. It should be noted that PI-2a was frequently present alone while PI-2b only rarely was not associated with PI-1. However, the most frequent combination was PI-1+PI-2a since it was present in over 45% of isolates.

[1733] Table II summarizes the distribution of pilus islands among the GBS isolates grouped by invasive disease manifestation or asymptomatic colonization. The data show no apparent association of disease or colonization with the presence of PI-1 and/or PI-2a/b, albeit few colonizing strains were studied. Similarly, no significant difference in the distribution of the islands was found between these three groups of isolates collected from patients in different geographic areas (data not shown). Thus, all strains were combined in the additional analyses reported.

[1734] Pilus Islands distribution correlates with serotype. Extending the analysis of pilus island distribution to GBS strains grouped by serotype, a good correlation was observed between presence of a particular combination of PIs and CPS type. Most serotype IA isolates (91%) contained only the PI-2a island, while the large majority (85%) of type IB strains had PI-1 inserted in their genome, as well as PI-2a (FIG. 256). Serotype II strains were always associated with PI-2a, alone or together with PI-1 in a nearly 50:50 ratio. In contrast, all serotype III isolates except one contained PI-1 in association with PI-2a (30%) or, more frequently, with PI-2b (69%). Indeed, 71 of 76 (94%) strains containing PI-1+PI-2b were serotype III.

[1735] Only 10 serotype IV isolates were included in this study and the distribution of pilus islands among these few strains does not correlate with the presence of a specific PI, except that, of 289 isolates, the only four strains that contained PI-2b alone were serotype IV (FIG. 256). For serotype V strains, nearly all (96%) contained PI-1+PI-2a and the remaining 4% had only PI-2a. Similarly, PI-1 and PI-2a were both present in the majority of NT strains.

[1736] Sequence conservation of PIs structural components. The PCR products obtained amplifying with specific primers the genomic regions coding for the three structural pili components of each island were sequenced for a total of 186 isolates, namely all the strains from the CDC and the Istituto Superiore di Sanità collections.

[1737] A summary of this analysis is presented in FIG. 257. The three genes coding for the structural proteins of PI-1 were extremely well conserved and their products differed by very few amino acids. In particular, the sequence of BP-1, the protein that is presumed to represent the backbone of pilus 1, showed a polymorphism at position 16 of the signal peptide sequence where a Met residue is substituted by Ile. This was observed in 37 strains, mostly serotype V isolates (78%). Smaller groups of strains contained single amino acid variants at other positions, such as the five isolates that had an Ala57Thr substitution or the eight strains, all serotype II isolates, that carried a point mutation resulting in a frameshift producing a termination codon after the Thr360 codon (FIG. 257, panel A). Similarly, one of the alleles of AP1-1, the major ancillary protein of pilus 1, contained an Ile190Asn polymorphism and all the strains that contained Asn at position 190 belonged to the serotype III group.

[1738] FIG. 256, panel B displays a schematic representation of the distribution of alleles of pilus island 2a among the 137 GBS isolates that contained this island. Since two of the structural proteins of PI-2a, BP-2a and AP1-2a, are variable and variants corresponding to five of the strains whose genome has been fully sequenced already have been described (12), the sequences analyzed here have been assigned to the variants present in these reference strains. Furthermore, two additional alleles have been identified among our isolates that are identical to those found in two laboratory strains, 090 (14) and DK21. Therefore, these were arbitrarily chosen as additional reference strains.

[1739] The phylogenetic relationship of BP-2a and AP1-2a variants in reference strains used in this study is shown in panel D of FIG. 257. Variability among AP1-2a alleles was limited and sequences from all reference strains fell into two groups that could be identified as the 2603 V/R and the H36B groups, which displayed 87% of amino acidic identity. In contrast, BP-2a variants were clearly more distant and only two alleles, the CJB111 and NEM316 variants that differ by 17 nucleotides or 11 amino acids, can be considered to be highly similar.

[1740] All the isolates analyzed contained BP-2a and AP1-2a variants from the same reference strain. Moreover, the distribution of PI-2a variants was strongly biased and correlated with strain serotype as well as with the presence/absence of PI-1 in the same strain. As shown in FIG. 257, serotype IA strains were predominantly associated with the 515 variant for the backbone protein BP-2a and the ancillary protein AP1-2a. Interestingly, all 31 strains containing the 515 variant belonged to the group of serotype IA isolates that had PI-2a alone, while the remaining 3 serotype IA strains, which were assigned to variant 090, contained PI-2a always in association with PI-1 (FIG. 256).

[1741] Similarly, the presence of PI-2a variant DK21 was restricted to serotype II strains devoid of PI-1 and, interestingly, this allele was found exclusively in serotype II strains from the CDC collection. Serotype II strains carrying PI-1 as well as PI-2a were associated with variants CJB111 or 2603 V/R. The same was observed for serotype III isolates. These nearly always contained PI-1 together with variant 2603 V/R, since this allele was never found in strains with PI-2a alone. This also was seen for variant CJB111 which was found only in strains containing PI-1 together with PI-2a, particularly in serotype IB and V strains.

[1742] Sequence analysis of PI-2b in 40 isolates has shown that the structural components of this island are very conserved. In particular, in 35 isolates, all of serotype III or IV, the sequences coding for the PI-2b pilus were 100% identical to those of strain COH1, whereas in the remaining 5 isolates, not belonging to serogroups III or IV, the sequence of the two genes coding for the ancillary proteins (AP1-2b and AP2-2b) were 100% identical to the corresponding sequences of the A909 reference strain. It is noteworthy that, as was found for the two reference strains, the gene coding for the pilus backbone (BP-2b) shared 100% identity in all 40 isolates (FIG. 257, panel C).

[1743] Pilus Islands components are surface exposed. Surface exposure of pili components was assessed by flow cytometry (FACS) analysis using antisera specific for the backbone and the major ancillary protein of each PI in intact cells of all 289 GBS isolates. The outcome of this analysis was instrumental in determining the relative amount of pilus component exposed on the bacterial surface and, more importantly, for assessing how suitable an antigen would be in protection against invasive GBS strains. In fact, it has been established that a 5-fold or greater shift in fluorescence over that observed in the control, stained with preimmune sera, correlates well with protective immunity (11).

[1744] FIG. 258 summarizes the results obtained after staining of all GBS isolates with antisera specific for BP-1 and AP1-1 (PI-1), BP-2a and AP1-2a (PI-2a), BP-2b and AP1-2b (PI-2b). Data are presented showing shifts in fluorescence greater than 2-fold or 5-fold the negative control. The lower threshold enables determination of the presence of the antigen on the bacterial surface, while the higher threshold gives a good correlation with in vivo protection (10). Surface staining with sera specific for PI-1 demonstrate that only 59% of the strains containing the island were FACS positive and only approximately half of these exposed the PI-1 antigens at high levels (FIG. 258). In contrast, the structural components of both PI-2a and PI-2b were surface exposed in over 90% of the strains and most of these showed a greater than 5-fold shift in fluorescence. In fact, high surface exposure was observed in 82% of the strains containing PI-2a and 92.5% of those with PI-2b. Since more than 70% of the isolates contained two pilus islands, it was important to establish if high surface exposure of components of two pilus types occurred simultaneously in the same strain. The results, presented in Table III, highlight how PI-1 antigens can be highly exposed on the surface in strains which contain, but do not expose, proteins of PI-2a or PI-2b. It is noteworthy that serotype V isolates demonstrated high surface exposure exclusively of PI-1 antigens in only 15 of 38 strains. In conclusion, a total of 263 isolates, representing 91% of all strains analyzed in this work, expose on the bacterial surface at least one of the three PIs at high level.

[1745] Each of the three types of pili contains two protective antigens. We have previously demonstrated that pilus components encoded by both PI-1 (BP-1 and AP1-1) and PI-2a (BP-2a and AP1-2a) are able to induce protective immunity in mice against GBS infection and that the levels of protection strongly correlate with antigen surface exposure (11). To investigate if structural components of PI-2b also elicit protection in vivo, we analyzed the recombinant proteins BP-2b and AP1-2b, expressed in E. coli as His-tagged fusions, by the active murine maternal immunization-neonatal pup challenge model previously described (11). CD-1 female mice were immunized with three doses (days 1, 21, 35) of either 20 μg of each antigen or PBS mixed with Freund's adjuvant, then mated and the resulting offspring were infected with a lethal dose of different GBS strains. As reported in Table IV, both proteins conferred significant levels of protection against those challenge strains in which the antigens were present and highly exposed on the bacterial surface (>5-fold shift in fluorescence).

[1746] AP1-2a variants from Pilus Island 2a are cross-protective. Since antigens encoded from PI-2a (BP-2a and AP1-2a, respectively the backbone and the ancillary protein 1) are the only protective pilin proteins showing gene variability, we investigated whether the allelic variants identified were protective not only against strains expressing a homologous protein but also against strains expressing a different variant.

[1747] We overexpressed the AP1-2a variants (2603 and H36B) and three of the six BP-2a variants (2603, 515 and CJB111) that together represent more than 80% of the sequenced genes coding for BP-2a. Each soluble purified protein was assessed in the mouse model described above using as challenge strains expressing either a homologous or a heterologous variant. As reported in Table V, all BP-2a proteins analyzed were able to protect only pups challenged with strains carrying the allelic variant used to immunize their mothers, while protection was not observed against strains expressing a heterologous allele. We also tested the in vitro opsonophagocytic activity of sera from mice immunized with the single variants in the presence of human polymorphonuclear leukocytes (PMNs) and baby rabbit complement by using different GBS strains each expressing one allelic variant. The results obtained uniformly correlated with the protection data reported above. In fact, all sera promoted efficient, complement-dependent opsonophagocytosis and killing by PMNs of only those strains carrying the homologous allele (data not shown). Both GBS 67 variants were cross-protective (Table V), and able to protect the offspring of immunized mice against lethal challenge with strains expressing either homologous or heterologous variants and antisera specific for each allele were able to mediate killing of bacteria expressing both variants (data not shown).

[1748] A pilus-based vaccine against GBS infections. We previously have demonstrated that a combination of protective antigens not effective against all strains (either not present or not sufficiently exposed on the bacterial surface) can be useful to develop a broadly effective vaccine against GBS infections (11). Although the six pilus antigens identified so far (two for each pilus type, the backbone and the major ancillary protein) are not universally protective antigens, a combination of all three pili can confer broad protection as demonstrated by this example.

[1749] In order to obtain the best minimal protein component vaccine formulation, we selected 3 antigens, one protein for each pilus type: the backbone components from PI-1 (BP-1) and PI-2b (BP-2b) and the ancillary protein 1 from PI-2a (AP1-2a). In fact, as our antigens are co-expressed in pairs in the same strains the exclusion of one protein for each pilus should not impact the vaccine coverage, but would reduce vaccine complexity. Selection criteria were based on gene variability results, on levels of protection in vivo compared with opsonophagocytic activity of each antigen in vitro and, finally, on difficulties of expression and purification. Although BP-2a is the main component (the backbone) of pilus type 2a and a very high opsonophagocytic activity was observed in vitro with sera of mice immunized with this single protein, we excluded this antigen due to its high gene variability and because its variants were not cross-protective against each other. For the pilus type 1 and type 2b, we excluded AP1-1 and AP1-2b mainly on the basis of the lower levels of protection observed in mice with respect to the corresponding alternative protein. The combination of the three selected antigens then was assessed in vivo in the same maternal/neonatal mouse model using a panel of GBS strains each expressing at high levels on the bacterial surface different combinations of pilus-like structures. As reported in Table VI, we observed protection against all strains tested with levels ranging from 50% to 100%. On the basis of the surface expression data of the three antigens in the collection of 289 isolates analyzed in this study and considering that at least one antigen was highly surface exposed (>5-fold shift in fluorescence), we estimate the strain coverage of a potential pilus-based vaccine would exceed 91% of the circulating strains assuming that these strains are representative of all invasive GBS strains.

[1750] Discussion. It has been shown that structural components of pili induce protective immunity in mouse models of GBS (11, 13). To date, three genomic islands coding for pilus-like structures have been identified in GBS (12, 13). However, as these islands are not conserved in all strains, a thorough study of their distribution was necessary to verify their potential as vaccine candidates. In this Example, we have analyzed a large number of GBS clinical isolates, mainly from infants and adults invasive infections, in order to assess the distribution of the three pilus-like genomic islands.

[1751] These represent regions of genomic diversity both in terms of presence/absence in the genome of a given GBS strain as well as for the sequence variability found between the same pilus components in different strains (12). An important finding in our analysis of 289 isolates collected in distant geographic areas was that all contained at least one of the three pilus genomic islands demonstrating that a vaccine with at least one antigen from each pilus island will provide broad protection. Furthermore, the locus harboring the PI-2 alleles was never found empty, with PI-2a being the predominant allele (present in 72% of the strains). This indicates that attribution of the pilus genomic island PI-2 to the “dispensable genome” of GBS (12, 15) should be re-defined. The finding that PI-2 alleles, different in structure but specifying similar functions (assembly of a pilus), are always present at the same locus, which as a consequence is never empty, suggests that this island represents a “variable” component of the core genome of GBS rather than a “dispensable” part of it. Alternatively, the presence of either of the two PI-2 pilus structures is so critical to the pathogenesis of invasive GBS disease that we could not find a single clinical isolate devoid of PI-2. This further indicates that a vaccine with an antigen selected from each PI-2 variant will similarly have broad protective scope.

[1752] As pili may be important for adhesion and host colonization, a first aim of our study was to verify if there was a correlation between the pilus islands genetic composition in clinical isolates and the type of invasive disease. No apparent association was found between the presence/absence of a particular PI and type of disease or carriage. This is in agreement with previous reports addressing the same question with regard to different genetic traits of GBS isolates, such as capsular serotypes and phylogenetic lineages. In general, reports in the literature indicate that there is no strong association between capsular loci and type of disease (16). However, there has been consistent and sustained epidemiologic evidence that serotype III strains are strongly associated with early- and late-onset meningitis as well as with late-onset infection irrespective of focus (5, 17) and, in particular, that specific lineages of serotype III GBS strains possibly correlate with early-onset disease (18, 19). Studies on distribution of several virulence factors (20) or pathogenicity islands (21) also failed to establish an absolute correlation between the presence in GBS isolates of a particular genetic determinant and the age at onset or clinical manifestation of disease.

[1753] In this example, the presence of a particular pilus island allele in a clinical isolate correlates well only with the CPS serotype of the strain. Generally, PI-1 is rarely present in serotype Ia strains, which contain predominantly only PI-2a, and is almost exclusively associated with PI-2a in serotype Ib and V strains. The presence of PI-2b alleles is restricted mainly to serotype III and IV isolates. Thus, in designing a vaccine, antigens from PI-2b are interchangeable with capsular polysaccharides from group II and IV. Interestingly, the few cases that do not display this correlation always contain variants of the PI sequences not conserved with respect to those found in the other strains. This is particularly true for the PI-2b genomic island, whereas for the PI-2a allele, which shows the broadest distribution and the highest degree of sequence divergence between the different strains, variants of the BP-2a and AP1-2a pilus components correlate both with strain serotype and presence in the same strain of the PI-1 pilus. As an example, when PI-2a is present in conjunction with PI-1 in serotype Ia strains, the sequences of BP-2a and AP1-2a are identical to the 090 variant, while the presence of PI-2a alone is always associated with the 515 variants of these genes. Thus, strains that differ in their PI composition with respect to the strains of the same serotype, invariably contain PI alleles different from those present in the other strains of that serotype.

[1754] In the context of this work, the analysis of distribution and gene variability of pili in clinical isolates of GBS had the objective of defining the coverage that a pilus-based vaccine against GBS would give by using as antigens pili components that are highly conserved in a wide range of isolates. A prerequisite of antigens used to induce protective immunity is that they should be well exposed on the bacterial surface. In fact, the levels of protection against GBS infection in murine models strongly correlate with antigen surface exposure (11). Among the 289 clinical isolates analyzed, a relatively low percentage of strains harboring PI-1 (31%) show high surface exposure of the PI-1 pilus components, whereas most of the strains containing PI-2a (82%) or PI-2b (92.5%) expose high levels of pilus proteins on the surface. The reason for this difference in behavior is unclear and more studies are needed to clarify this point. Certainly, the low percentage of strains exposing the PI-1 pilus on the surface cannot be ascribed to sequence diversity of PI-1 components in different strains, since this island shows the highest sequence conservation. It is more likely that, in our experimental conditions, expression and assembly of pili components are regulated in a different manner for the different types of pili. Whatever the reason for this, it is very important to note that 15 serotype V clinical isolates, containing both PI-1 and PI-2a, and 3 serotype III strains, which contain PI-1 in conjunction with PI-2b, demonstrated high surface exposure only of PI-1 components. Thus, inclusion of the PI-1 backbone protein in a GBS vaccine should induce protection against a significant number of serotype V GBS infections and therefore are interchangeable with capsular polysaccharides from serotype V. The coverage by including the PI-2b backbone protein in a vaccine combination is, instead, substantial for serotype III GBS strains.

### References for Example 28

[1755] 1. Telford, J. L., M. A. Barocchi, I. Margarit, R. Rappuoli, and G. Grandi. 2006. Pili in gram-positive pathogens. Nat Rev Microbiol 4:509-519.

[1756] 2. Beckmann, C., J. D. Waggoner, T. O. Harris, G. S. Tamura, and C. E. Rubens. 2002. Identification of novel adhesins from Group B streptococci by use of phage display reveals that C5a peptidase mediates fibronectin binding. Infect Immun 70:2869-2876.

[1757] 3. Tamura, G. S., and C. E. Rubens. 1995. Group B streptococci adhere to a variant of fibronectin attached to a solid phase. Mol Microbiol 15:581-589.

[1758] 4. Spellerberg, B., E. Rozdzinski, S. Martin, J. Weber-Heynemann, N. Schnitzler, R. Lutticken, and A. Podbielski. 1999. Lmb, a protein with similarities to the LraI adhesin family, mediates attachment of Streptococcus agalactiae to human laminin. Infect Immun 67:871-878.

[1759] 5. Gibbs, R. S., S. Schrag, and A. Schuchat. 2004. Perinatal infections due to group B streptococci. Obstet Gynecol 104:1062-1076.

[1760] 6. Edwards, M. S., and C. J. Baker. 2005. Group B streptococcal infections in elderly adults. Clin Infect Dis 41:839-847.

[1761] 7. Benson, J. A., A. E. Flores, C. J. Baker, S. L. Hillier, and P. Ferrieri. 2002. Improved methods for typing nontypeable isolates of group B streptococci. Int J Med Microbiol 292:37-42.

[1762] 8. Ramaswamy, S. V., P. Ferrieri, A. E. Flores, and L. C. Paoletti. 2006. Molecular characterization of nontypeable group B streptococcus. J Clin Microbiol 44:2398-2403.

[1763] 9. Harrison, L. H., J. A. Elliott, D. M. Dwyer, J. P. Libonati, P. Ferrieri, L. Billmann, and A. Schuchat. 1998. Serotype distribution of invasive group B streptococcal isolates in Maryland: implications for vaccine formulation. Maryland Emerging Infections Program. J Infect Dis 177:998-1002.

[1764] 10. Baker, C. J., D. L. Kasper, I. Tager, A. Paredes, S. Alpert, W. M. McCormack, and D. Goroff. 1977. Quantitative determination of antibody to capsular polysaccharide in infection with type III strains of group B Streptococcus. J Clin Invest 59:810-818.

[1765] 11. Maione, D., I. Margarit, C. D. Rinaudo, V. Masignani, M. Mora, M. Scarselli, H. Tettelin, C. Brettoni, E. T. Iacobini, R. Rosini, N. D'Agostino, L. Miorin, S. Buccato, M. Mariani, G. Galli, R. Nogarotto, V. N. Dei, F. Vegni, C. Fraser, G. Mancuso, G. Teti, L. C. Madoff, L. C. Paoletti, R. Rappuoli, D. L. Kasper, J. L. Telford, and G. Grandi. 2005. Identification of a Universal Group B Streptococcus Vaccine by Multiple Genome Screen. Science 309:148-150.

[1766] 12. Tettelin, H., V. Masignani, M. J. Cieslewicz, C. Donati, D. Medini, N. L. Ward, S. V. Angiuoli, J. Crabtree, A. L. Jones, A. S. Durkin, R. T. Deboy, T. M. Davidsen, M. Mora, M. Scarselli, Y. R. I. Margarit, J. D. Peterson, C. R. Hauser, J. P. Sundaram, W. C. Nelson, R. Madupu, L. M. Brinkac, R. J. Dodson, M. J. Rosovitz, S. A. Sullivan, S. C. Daugherty, D. H. Haft, J. Selengut, M. L. Gwinn, L. Zhou, N. Zafar, H. Khouri, D. Radune, G. Dimitrov, K. Watkins, J. O'Connor K, S. Smith, T. R. Utterback, O. White, C. E. Rubens, G. Grandi, L. C. Madoff, D. L. Kasper, J. L. Telford, M. R. Wessels, R. Rappuoli, and C. M. Fraser. 2005. Genome analysis of multiple pathogenic isolates of Streptococcus agalactiae: Implications for the microbial “pan-genome”. Proc Natl Acad Sci USA 102:13950-13955.

[1767] 13. Rosini, R., C. D. Rinaudo, M. Soriani, P. Lauer, M. Mora, D. Maione, A. Taddei, I. Santi, C. Ghezzo, C. Brettoni, S. Buccato, I. Margarit, G. Grandi, and J. L. Telford. 2006. Identification of novel genomic islands coding for antigenic pilus-like structures in Streptococcus agalactiae. Mol Microbiol 61:126-141.

[1768] 14. Lancefield, R. C. 1938. Two serological types of group B hemolytic streptococci with related, but not identical, type-specific substances. J Exp Med 67:25-40.

[1769] 15. Medini, D., C. Donati, H. Tettelin, V. Masignani, and R. Rappuoli. 2005. The microbial pan-genome. Curr Opin Genet Dev 15:589-594.

[1770] 16. Hauge, M., C. Jespersgaard, K. Poulsen, and M. Kilian. 1996. Population structure of Streptococcus agalactiae reveals an association between specific evolutionary lineages and putative virulence factors but not disease. Infect Immun 64:919-925.

[1771] 17. Weisner, A. M., A. P. Johnson, T. L. Lamagni, E. Arnold, M. Warner, P. T. Heath, and A. Efstratiou. 2004. Characterization of group B streptococci recovered from infants with invasive disease in England and Wales. Clin Infect Dis 38:1203-1208.

[1772] 18. Jones, N., J. F. Bohnsack, S. Takahashi, K. A. Oliver, M.-S. Chan, F. Kunst, P. Glaser, C. Rusniok, D. W. M. Crook, R. M. Harding, N. Bisharat, and B. G. Spratt. 2003. Multilocus Sequence Typing System for Group B Streptococcus. J. Clin. Microbiol. 41:2530-2536.

[1773] 19. Lin, F.-Y. C., A. Whiting, E Adderson, S. Takahashi, D. M. Dunn, R. Weiss, P. H. Azimi, J. B. Philips, III, L. E. Weisman, J. Regan, P. Clark, G. G. Rhoads, C. E. Frasch, J. Troendle, P. Moyer, and J. F. Bohnsack. 2006. Phylogenetic Lineages of Invasive and Colonizing Strains of Serotype III Group B Streptococci from Neonates: a Multicenter Prospective Study. J. Clin. Microbiol. 44:1257-1261.

[1774] 20. Brochet, M., E. Couve, M. Zouine, T. Vallaeys, C. Rusniok, M. C. Lamy, C. Buchrieser, P. Trieu-Cuot, F. Kunst, C. Poyart, and P. Glaser. 2006. Genomic diversity and evolution within the species Streptococcus agalactiae. Microbes Infect 8:1227-1243.

[1775] 21. Herbert, M. A., C. J. Beveridge, D. McCormick, E. Aten, N. Jones, L. A. Snyder, and N. J. Saunders. 2005. Genetic islands of Streptococcus agalactiae strains NEM316 and 2603VR and their presence in other Group B streptococcal strains. BMC Microbiol 5:31.

[1776] 22. Montigiani, S., F. Falugi, M. Scarselli, O. Finco, R. Petracca, G. Galli, M. Mariani, R. Manetti, M. Agnusdei, R. Cevenini, M. Donati, R. Nogarotto, N. Norais, I. Garaguso, S. Nuti, G. Saletti, D. Rosa, G. Ratti, and G. Grandi. 2002. Genomic approach for analysis of surface proteins in Chlamydia pneumoniae. Infect Immun 70:368-379.

[1777] All publications mentioned in the above specification are herein incorporated by reference. Various modifications and variations of the described methods and system of the invention will be apparent to those skilled in the art without departing from the scope and spirit of the invention. Although the invention has been described in connection with specific preferred embodiments, it should be understood that the invention as claimed should not be unduly limited to such specific embodiments. Indeed, various modifications of the described modes for carrying out the invention which are obvious to those skilled in molecular biology or related fields are intended to be covered by the present invention.

TABLE I
GBS clinical isolates analyzed in this study.

| | | Serotype | | | | | | | | |
|---|---|---|---|---|---|---|---|---|---|---|
| Origin | Disease | IA | IB | II | III | IV | V | Other | NT | Total |
| CDC-Center for Disease | Early onset | 13 | 3 | 9 | 13 | 1 | 14 | | | 53 |
| Control, Atlanta, USA | Late onset | 4 | 4 | 4 | 6 | | 6 | | | 24 |
| | Adult | 4 | 1 | 5 | 5 | 4 | 4 | | | 23 |
| | | 21 | 8 | 18 | 24 | 5 | 24 | | | 100 |
| Baylor College of | Early onset | 9 | 2 | 2 | 12 | | 5 | | 1 | 31 |
| Medicine, Houston, USA | Late onset | 12 | 3 | | 41 | | 6 | | | 62 |
| | Adult | | | | | | | | 10* | 10 |
| | | 21 | 5 | 2 | 53 | | 11 | | 11 | 103 |
| Istituto Superiore di | Early onset | 5 | 1 | 2 | 6 | 1 | 3 | | | 18 |
| Sanita, Rome, Italy | Late onset | 1 | 2 | | 11 | | 2 | | | 16 |
| | Adult | 9 | 3 | 6 | 8 | 2 | 7 | 2 | 6 | 43 |
| | Colonizing | 1 | 2 | 2 | | 3 | 1 | | | 9 |
| | | 16 | 8 | 10 | 25 | 6 | 13 | 2 | 6 | 86 |

*NT by serotyping; using genotyping among these 10 strains there were 3 IA, 2 IV, 4 V and 1 VI types.

TABLE II
Pilus islands distribution in 289 isolates of invasive and colonizing GBS.

| | Early onset | Late onset | Adult | Colonizing | |
|---|---|---|---|---|---|
| | No. of strains (%) | | | | All isolates (%) |
| PI-1 | | | | | 0 |
| PI-2a | 33 (32) | 21 (21) | 20 (26) | 3 (33) | 77 (26.6) |
| PI-2b | 1 (1) | | 3 (4) | | 4 (1.4) |
| PI-1 + PI-2a | 45 (44) | 36 (35) | 46 (61) | 5 (56) | 132 (45.7) |
| PI-1 + PI-2b | 23 (23) | 45 (44) | 7 (9) | 1 (11) | 76 (26.3) |
| Total | 102 (100) | 102 (100) | 76 (100) | 9 (100) | 289 (100) |

TABLE III
High surface exposure of pilus islands components in GBS clinical isolates grouped by serotype.

| | | | | | | | | | | All |
|---|---|---|---|---|---|---|---|---|---|---|
| | Highly surface | Serotype | | | | | | | | capsular |
| | exposed pilus | Ia | Ib | II | III | IV | V | Other | NT | serotypes |
| PI-2a | | 49 (92) | 1 (5) | 13 (54) | 1 (1) | 1 (10) | 2 (4) | 1 (33) | 4 (24) | 72 (27) |
| PI-2b | | | | | | 4 (40) | | | | 4 (2) |
| | PI-1 | | | | | | 15 | | | |
| | PI-2a | 4 | 16 | 10 | 24 | 4 | 6 | 1 | 8 | |
| | PI-1 + PI-2a | | | 1 | 4 | | 17 | | 4 | |
| PI-1 + PI-2a | total | 4 (8) | 16 (84) | 11 (46) | 28 (29) | 4 (40) | 38 (96) | 1 (33) | 12 (71) | 114 (43) |
| | PI-1 | | | | 3 | | | | | |
| | PI-2b | | 1 | | 46 | | | | | |
| | PI-1 + PI-2b | | 1 | | 20 | | | 1 | 1 | |
| PI-1 + PI-2b | total | | 2 (11) | | 69 (70) | | | 1 (33) | 1 (5) | 73 (28) |
| Total | | 53 (100) | 19 (100) | 24 (100) | 98 (100) | 9 (100) | 40 (100) | 3 (100) | 17 (100) | 263 (100) |

NOTE.
Data are number of strains (%)

TABLE IV
Protection conferred by the PI-2b proteins, BP-2b and
AP1-2b, against GBS strains

| | | Fluorescence† | | Statistical |
|---|---|---|---|---|
| | | (immune/ | | significance |
| Antigen | GBS strain (type) | preimmune) | Protection % | p value |
| BP-2b | COH1 (III) | 7.7 | 72.4 | <0.0001 |
| | M781 (III) | 6.2 | 95.8 | <0.0001 |
| | M732 (III) | 9.7 | 87.7 | <0.0001 |
| | 6213 (III) | 8.2 | 72.0 | <0.0001 |
| | SMU071 (VIII) | 11.6 | 56.0 | <0.0001 |
| | A909 (Ia) | 11.5 | 82.9 | <0.0001 |
| | CJB111 (V) | 0* | 17.5 | >0.05 |
| AP1-2b | COH1 (III) | 6.3 | 49.5 | <0.0001 |
| | M781 (III) | 6.3 | 82.1 | <0.0001 |
| | SMU071 (VIII) | 10.2 | 58.0^{§} | <0.0001 |

assessed by active maternal immunization/neonatal pup challenge model.
†expressed as shift in fluorescence
*gene missing in this strain
^{§}N-terminal region of AP1-2b

TABLE V
Protection conferred by BP-2a and AP1-2a variants against strains carrying either
homologous or heterologous proteins tested in the mouse active maternal
immunization/neonatal model.

| | | | | | | Statistical |
|---|---|---|---|---|---|---|
| | GBS strain | Allelic | Protein | PBS | | significance |
| Antigen | (serotype) | variant | alive/treated | alive/treated | Protection % | p value |
| BP-2a | CJB111 (V) | CJB111 | 41/50 | 6/72 | 80.4 | <0.0001 |
| CJB111 variant | 515 (Ia) | 515 | 0/40 | 6/53 | 0 | 0.04 |
| | 3050 (II) | 2603 | 5/39 | 5/46 | 2.2 | 1 |
| BP-2a | CJB111 (V) | CJB111 | 6/40 | 6/72 | 7.6 | >0.05 |
| 515 variant | 515 (Ia) | 515 | 24/43 | 6/53 | 50.6 | <0.0001 |
| | 3050 (II) | 2603 | 3/34 | 5/46 | 0 | 1 |
| BP-2a | CJB111 (V) | CJB111 | 0/20 | 6/72 | 0 | >0.05 |
| 2603 variant | 515 (Ia) | 515 | 14/37 | 6/53 | 30 | 0.004 |
| | 3050 (II) | 2603 | 28/30 | 5/46 | 92.1 | <0.0001 |
| AP1-2a | CJB111 (V) | CJB111 | 31/40 | 9/35 | 69.6 | <0.0001 |
| 2603 variant | 515 (Ia) | 515 | 31/40 | 14/34 | 61.9 | 0.0018 |
| | 3050 (II) | 2603 | 36/38 | 5/46 | 94.4 | <0.0001 |
| | 5401 (II) | H36B | 37/54 | 11/76 | 62.8 | <0.0001 |
| AP1-2a | 515 (Ia) | 515 | 45/75 | 5/80 | 57.4 | <0.0001 |
| H36B variant | 5401 (II) | H36B | 31/45 | 10/40 | 58.7 | <0.0001 |
| | DK21 (II) | H36B | 22/33 | 6/36 | 60.2 | <0.0001 |

TABLE VI
Neonatal protection conferred by a pilus-based vaccine formulation against
nine strains expressing different combinations of pili. Mice were immunized
with a mixture of 15 μg of each pilus protein (BP-1 + AP1-2a + BP-2b)
in Freund's adjuvant.

| | | Fluorescence (Immune-Preimmune) | | | | | | |
|---|---|---|---|---|---|---|---|---|
| | | | BP-1 | AP1-2a | BP-2b | Vaccine | PBS | Protection* |
| GBS strains | Serotype | PCR | (PI-1) | (PI-2a) | (PI-2b) | Alive/Treated | Alive/Treated | % |
| A909 | Ia | PI-1 + PI-2b | 0 | — | 10.6 | 35/40 | 2/40 | 86.3 |
| 515 | Ia | PI-2a | — | 10.1 | — | 28/53 | 0/40 | 53.0 |
| 3050 | II | PI-1 + PI-2a | 1.7 | 11.3 | — | 68/68 | 14/49 | 100 |
| 5401 | II | PI-1 + PI-2a | 1.8 | 15.2 | — | 31/39 | 11/50 | 73.1 |
| COH1 | III | PI-1 + PI-2b | 7.5 | — | 7.7 | 52/54 | 5/60 | 95.7 |
| M732 | III | PI-1 + PI-2b | 3.5 | — | 9.7 | 37/40 | 16/57 | 88.9 |
| M781 | III | PI-1 + PI-2b | 2.7 | — | 6.2 | 30/48 | 11/50 | 51.3 |
| CJB111 | V | PI-1 + PI-2a | 9.0 | 11.8 | — | 51/54 | 9/30 | 91.4 |
| JM9130013 | VIII | PI-1 + PI-2b | 14.4 | — | 11.9 | 24/39 | 8/47 | 54.2 |

*Protection p value <0.0001 by Fisher's exact test

TABLE VII
Primers used for PCR amplifications.

| | | |
|---|---|---|
| Primer | Sequence (5′ to 3′) | Description |

| | | |
|---|---|---|
| BP-1 for | CTGTGCTAAACTTTAATAGTTTTGTGC | Primers for amplification of the PI-1 backbone coding gene |
| BP-1 rev | AGGCTATTTCTCTTTTCTTAAACATGG | |
| AP1-1 for | GTCAATAACGATGTTGTGAATGGC | Primers for amplification of the PI-1 ancillary protein 1 |
| AP1-1 rev | CTGACAATAGGGAAAGGCCAAAAC | coding gene |
| AP2-1 for | CCATGTTTAAGAAAAGAGAAATAGCCT | Primers for amplification of the PI-1 ancillary protein 2 |
| AP2-1 rev | GGAAACCCGCTAAGA7˜AATTAAACG | coding gene |
| BP-2a for | CTATGATGTCTATTGCAGGTGGAA | Primers for amplification of the PI-2a backbone coding |
| BP-2a rev | GAGTACTTCTACTGAAATACCC | gene |
| AP1-2a for | CTAGGATATTCTGTATCTGATCTTAG | Primers for amplification of the PI-2a ancillary protein 1 |
| AP1-2a rev | ACCGCAGCACCACTCCATTC | coding gene |
| AP2-2a for | CCTCTTATCAATCCTAGTTATTC | Primers for amplification of the PI-2a ancillary protein 2 |
| AP2-2a rev | CCCTGCCCTGAAGACACCTA | coding gene |
| BP-2b for | TTTAGCTTTAGCTCTACCATCAGG | Primers for amplification of the PI-2b backbone coding |
| BP-2b rev | CCCACTGCAATTATAGTGACAAGC | gene |
| AP1-2b for | TTCTTTCAGAATATGGCCTCTAGG | Primers for amplification of the 5′ half of the PI-2b ancillary |
| AP1N-2b rev | GCCAACCTGCATAGACTTTAACATC | protein 1 coding gene |
| AP1C-2b for | GATCCGCTTGATAATACAGAGCTTC | Primers for amplification of the 3′ half of the PI-2b ancillary |
| AP1-2b rev | TCGCCACTAACAGCGATTGAATC | protein 1 coding gene |
| AP2-2b for | AGAAGTAACTAGGAGAGCACGTC | Primers for amplification of the PI-2b ancillary protein 2 |
| AP2-2b rev | CCCCAATAGATTCCAGAACTTACC | coding gene |

1. An immunogenic composition comprising a purified Gram positive bacteria adhesin island (AI) polypeptide in an oligomeric form.

2. The immunogenic composition of claim 1 wherein the AI polypeptide comprises a sortase substrate motif.

3. The immunogenic composition of claim 2 wherein the sortase substrate motif is an LPXTG motif.

4. The immunogenic composition of claim 3 wherein the LPXTG motif is represented by the sequence XPXTG, wherein X at amino acid position 1 is L, I, or F and wherein X at amino acid position 3 is any amino acid residue.

5. The immunogenic composition of claim 3 wherein the LPXTG motif is represented by XXXXG, wherein X at amino acid position 1 is L, V, E, I, F, or Q; wherein X at amino acid position 2 is P if X at amino acid position 1 is L, I, or F; wherein X at amino acid position 2 is V if X at amino acid position 1 is E or Q; wherein X at amino acid position 2 is V or P if X at amino acid position 1 is V; wherein X at amino acid position 3 is any amino acid residue; wherein X at amino acid position 4 is T if X at amino acid position 1 is V, E, I, F, or Q; and wherein X at amino acid position 4 is T, S, or A if X at amino acid position 1 is L.

6. The immunogenic composition of claim 1 wherein the Gram positive bacteria AI polypeptide affects the ability of Gram positive bacteria to adhere to epithelial cells.

7. The immunogenic composition of claim 1 wherein the Gram positive bacteria AI polypeptide affects the ability of Gram positive bacteria to invade epithelial cells.

8. The immunogenic composition of claim 1 wherein the Gram positive bacteria AI polypeptide affects the ability of Gram positive bacteria to translocate through an epithelial cell layer.

9. The immunogenic composition of claim 1 wherein the Gram positive bacteria AI polypeptide is capable of associating with an epithelial cell surface.

10. The immunogenic composition of claim 9 wherein the associating with an epithelial cell surface is binding to the epithelial cell surface.

11. The immunogenic composition of claim 1 wherein the Gram positive bacteria AI polypeptide is a full-length protein.

12. The immunogenic composition of claim 1 wherein the Gram positive bacteria AI polypeptide is a fragment of a full-length protein.

13. The immunogenic composition of claim 12 wherein the fragment comprises at least 7 contiguous amino acid residues of the Gram positive bacteria AI protein.

14. The immunogenic composition of claim 1 wherein the Gram positive bacteria are of a genus selected from the group consisting of Streptococcus, Enterococcus, Staphylococcus, Clostridium, Corynebacterium, or Listeria.

15. The immunogenic composition of claim 14 wherein the Gram positive bacteria are of the genus Streptococcus.

16. The immunogenic composition of claim 15 wherein the bacteria are Group B Streptococcus (GBS).

17. The immunogenic composition of claim 16 wherein the AI polypeptide is a GBS Adhesin Island 1 (AI-1) polypeptide.

18. The immunogenic composition of claim 17 wherein the GBS AI-1 polypeptide is selected from the group consisting of GBS 80, GBS 104, GBS 52, and fragments thereof.

19. The immunogenic composition of claim 17 wherein the AI-1 polypeptide is GBS 80.

20. The immunogenic composition of claim 14 wherein the AI polypeptide is a GBS Adhesin Island 2 (AI-2) polypeptide.

21. The immunogenic composition of claim 20 wherein the GBS AI-2 polypeptide is selected from the group consisting of GBS 59, GBS 67, GBS 150, 01521, 01523, 01524, and fragments thereof.

22. The immunogenic composition of claim 15 wherein the Gram positive bacteria are Group A Streptococcus (GAS) polypeptide.

23. The immunogenic composition of claim 22 wherein the AI polypeptide is a GAS Adhesin Island 1 (GAS AI-1) polypeptide.

24. The immunogenic composition of claim 23 wherein the GAS AI-1 polypeptide is selected from the group consisting of M6_Spy0157, M6_Spy0159, M6_Spy0160, CDC SS 410_fimbrial, ISS3650_fimbrial, DSM2071_fimbrial, and fragments thereof.

25. The immunogenic composition of claim 22 wherein the polypeptide is a GAS Adhesin Island 2 (GAS AI-2) polypeptide.

26. The immunogenic composition of claim 25 wherein the GAS AI-2 polypeptide is selected from the group consisting of GAS15, GAS16, GAS 18, and fragments thereof.

27. The immunogenic composition of claim 20 wherein the AI polypeptide is a GAS Adhesin Island 3 (GAS AI-3) polypeptide.

28. The immunogenic composition of claim 27 wherein the GAS AI-3 polypeptide is selected from the group consisting of SpyM3_{—}0098, SpyM3_{—}0100, SpyM3_{—}0102, SpyM3_{—}0104, SPs0100, SPs0102, SPs0104, SPs0106, orf78, orf80, orf82, orf84, spyM18_{—}0126, spyM18_{—}0128, spyM18_{—}0130, spyM18_{—}0132, SpyoM01000156, SpyoM01000155, SpyoM01000154, SpyoM01000153, SpyoM01000152, SpyoM01000151, SpyoM01000150, SpyoM01000149, ISS3040_fimbrial, ISS3776_fimbrial, ISS4959_fimbrial, and fragments thereof.

29. The immunogenic composition of claim 22 wherein the AI polypeptide is a GAS Adhesin Island 4 (GAS AI-4) polypeptide.

30. The immunogenic composition of claim 29 wherein the GAS AI-4 polypeptide is selected from the group consisting of 19224134, 19224135, 19224137, 19224139, 19224141, 20010296_fimbrial, 20020069_fimbrial, CDC SS 635_fimbrial, ISS4883_fimbrial, ISS4538_fimbrial, and fragments thereof.

31. The immunogenic composition of claim 22 wherein the AI polypeptide is a GAS Adhesin Island 5 (AI-5) polypeptide.

32. The immunogenic composition of claim 31 wherein the GAS AI-5 polypeptide is selected from the group consisting of MGAS10270_Spy0108, MGAS10270_Spy0109, MGAS10270_Spy0110, MGAS10270_Spy0111, MGAS10270_Spy0112, MGAS10270_Spy0113, MGAS10270_Spy0114, MGAS10270_Spy0115, MGAS10270_Spy0116, and MGAS10270_Spy0117.

33. The immunogenic composition of claim 22 wherein the AI polypeptide is a GAS Adhesin Island 6 (AI-6) polypeptide.

34. The immunogenic composition of claim 33 wherein the GAS AI-6 polypeptide is selected from the group consisting of MGAS10750_Spy0113, MGAS10750_Spy0114, MGAS10750_Spy0115, MGAS10750_Spy0116, MGAS10750_Spy0117, MGAS10750_Spy0118, MGAS10750_Spy0119, and MGAS10750_Spy0120.

35. The immunogenic composition of claim 1 wherein the bacteria are Streptococcus pneumoniae (SP).

36. The immunogenic composition of claim 35 wherein the AI polypeptide is selected from the group consisting of SP0462, SP0463, SP0464, orf3_{—}670, orf4_{—}670, orf5_{—}670, ORF3_{—}14CSR, ORF4_{—}14CSR, ORF5_{—}14CSR, ORF3_{—}19AH, ORF4_{—}19AH, ORF5_{—}19AH, ORF3_{—}19FTW, ORF4_{—}19FTW, ORF5_{—}19FTW, ORF3_{—}23FP, ORF4_{—23}FP, ORF5_{—}23FP, ORF3_{—}23FTW, ORF4_{—}23FTW, ORF5_{—}23FTW, ORF3_{—}6BF, ORF4_{—}6BF, ORF5_{—}6BF, ORF3_{—}136BSP, ORF4_{—}6BSP, ORF5_{—}6BSP, ORF3_{—}9VSP, ORF4_{—}9VSP, ORF5_{—}9VSP, and fragments thereof.

37. The immunogenic composition of claim 1 wherein the oligomeric form is a hyperoligomer.

38. An immunogenic composition comprising a first and a second Gram positive bacteria adhesin island (AI) polypeptide.

39. The immunogenic composition of claim 38 wherein the Gram positive bacteria are of a genus selected from the group consisting of Streptococcus, Enterococcus, Staphylococcus, Clostridium, Corynebacterium, or Listeria.

40. The immunogenic composition of claim 38 wherein the first AI polypeptide is a GBS AI-1 polypeptide.

41. The immunogenic composition of claim 40 wherein the GBS AI-1 polypeptide is selected from the group consisting of GBS 80, GBS 104, GBS 52, and fragments thereof.

42. The immunogenic composition of claim 38 wherein the first AI polypeptide is a GBS AI-2 polypeptide.

43. The immunogenic composition of claim 42 wherein the GBS AI-2 polypeptide is selected from the group consisting of GBS 59, GBS 67, GBS 150, 01521, 01523, 01524, and fragments thereof.

44. The immunogenic composition of claim 38 wherein the first AI polypeptide is GBS 80 and the second AI polypeptide is GBS 67.

45. The immunogenic composition of claim 38 wherein the first AI polypeptide is a Group A Streptococcus (GAS) AI polypeptide.

46. The immunogenic composition of claim 45 wherein the GAS AI polypeptide is a first GAS AI-1 polypeptide.

47. The immunogenic composition of claim 46 wherein the first GAS AI-1 polypeptide is selected from the group consisting of M6_Spy0157, M6_Spy0159, M6_Spy0160, CDC SS 410_fimbrial, ISS3650_fimbrial, DSM2071_fimbrial, and fragments thereof.

48. The immunogenic composition of claim 45 wherein the GAS AI polypeptide is a first GAS AI-2 polypeptide.

49. The immunogenic composition of claim 48 wherein the first GAS AI-2 polypeptide is selected from the group consisting of GAS15, GAS16, GAS 18, and fragments thereof.

50. The immunogenic composition of claim 45 wherein the GAS AI polypeptide is a first GAS AI-3 polypeptide.

51. The immunogenic composition of claim 50 wherein the first GAS AI-3 polypeptide is selected from the group consisting of SpyM3_{—}0098, SpyM3_{—}0100, SpyM3_{—}0102, SpyM3_{—}0104, SPs0100, SPs0102, SPs0104, SPs0106, orf78, orf80, orf82, orf84, spyM18_{—}0126, spyM18_{—}0128, spyM18_{—}0130, spyM18 _{—}0132, SpyoM01000156, SpyoM01000155, SpyoM01000154, SpyoM01000153, SpyoM01000152, SpyoM01000151, SpyoM01000150, SpyoM01000149, ISS3040_fimbrial, ISS3776_fimbrial, ISS4959_fimbrial, and fragments thereof.

52. The immunogenic composition of claim 45 wherein the GAS AI polypeptide is a first GAS AI-4 polypeptide.

53. The immunogenic composition of claim 52 wherein the first GAS AI-4 polypeptide is selected from the group consisting of 19224134, 19224135, 19224137, 19224139, 19224141, 20010296_fimbrial, 20020069_fimbrial, CDC SS 635_fimbrial, ISS4883_fimbrial, ISS4538_fimbrial, and fragments thereof.

54. The immunogenic composition of claim 45 wherein the GAS AI polypeptide is a first GAS AI-5 polypeptide.

55. The immunogenic composition of claim 54 wherein the first GAS AI-5 polypeptide is selected from the group consisting of MGAS10270_Spy0108, MGAS10270_Spy0109, MGAS10270_Spy0110, MGAS10270_Spy0111, MGAS10270_Spy0112, MGAS10270_Spy0113, MGAS10270_Spy0114, MGAS10270_Spy0115, MGAS10270_Spy0116, and MGAS10270_Spy0117.

56. The immunogenic composition of claim 45 wherein the GAS AI polypeptide is a first GAS AI-6 polypeptide.

57. The immunogenic composition of claim 56 wherein the first GAS AI-6 polypeptide is selected from the group consisting of MGAS10750_Spy0113, MGAS10750_Spy0114, MGAS10750_Spy0115, MGAS10750_Spy0116, MGAS10750_Spy0117, MGAS10750_Spy0118, MGAS10750_Spy0119, and MGAS10750_Spy0120.

58. The immunogenic composition of claim 45 wherein the second Gram positive bacteria AI polypeptide is selected from the group consisting of a second GAS AI-1 polypeptide, a second GAS AI-2 polypeptide, a second GAS AI-3 polypeptide, a second GAS AI-4 polypeptide, a second GAS AI-5 polypeptide, and a second GAS AI-6 polypeptide.

59. The immunogenic composition of claim 38 comprising a first and a second S. pneumoniae AI polypeptide.

60. The immunogenic composition of claim 59 wherein the first and the second S. pneumoniae AI polypeptide are each selected from the group consisting of SP0462, SP0463, SP0464, orf3_{—}670, orf4_{—}670, orf5_{—}670, ORF3_{—}14CSR, ORF4_{—}14CSR, ORF1_{—}14CSR, ORF3_{—}19AH, ORF4_{—}19AH, ORF5_{—}19AH, ORF3_{—}19FTW, ORF4_{—}19FTW, ORF5_{—}19FTW, ORF3_{—}23FP, ORF4_{—}23FP, ORF5_{—}23FP, ORF3_{—}23FTW, ORF4_{—}23FTW, ORF5_{—}23FTW, ORF3_{—}6BF, ORF4_{—}6BF, ORF5_{—}6BF, ORF3_{—}6BSP, ORF4_{—}6BSP, ORF5_{—}6BSP, ORF3_{—}9VSP, ORF4_{—}9VSP, ORF5_{—}9VSP, and fragments thereof.

61. The immunogenic composition of claim 38 wherein a full length polynucleotide sequence encoding for the first Gram positive bacteria AI polypeptide is not present in a genome of a Gram positive bacteria comprising a full length polynucleotide sequence encoding for the second Gram positive bacteria AI polypeptide.

62. The immunogenic composition of claim 38 wherein polynucleotides encoding the first and the second Gram positive bacteria AI polypeptide are each present in genomes of more than one Gram positive bacteria serotype and strain isolate.

63. The immunogenic composition of claim 38 wherein the first and the second Gram positive bacteria AI polypeptides are of different Gram positive bacteria species.

64. The immunogenic composition of claim 38 wherein the first and the second Gram positive bacteria AI polypeptides are of the same Gram positive bacteria species.

65. The immunogenic composition of claim 38 wherein the first and the second Gram positive bacteria AI polypeptides are from different AI subtypes.

66. The immunogenic composition of claim 38 wherein the first and the second Gram positive bacteria AI polypeptides are from the same AI subtype.

67. The immunogenic composition of claim 38 wherein the first Gram positive bacteria AI polypeptide has detectable surface exposure on a first Gram positive bacteria strain or serotype but not a second Gram positive bacteria strain or subtype and the second Gram positive bacteria AI polypeptide has detectable surface exposure on the second Gram positive bacteria strain or serotype but not the first Gram positive bacteria strain or serotype.

68. The immunogenic composition of claim 38 wherein the Gram positive bacteria are S. pneumoniae, S. mutans, E. faecalis, E. faecium, C. difficile, L. monocytogenes, or C. diphtheriae.

69. An immunogenic composition comprising one or both of GBS59^{DK21} and GBS59^{CJB110} polypeptides or fragments thereof.

70. The composition of claim 69 wherein the combination comprises GBS59^{DK21} and GBS59^{CJB110}.

71. The immunogenic composition of claim 1 further comprising one or more GBS polypeptides selected from the group consisting of GBS80, GBS104, GBS67²⁶⁰³, GBS67^{H36B}, GBS59²⁶⁰³, GBS59^{CJB111}, GBS59⁵¹⁵, GBS59^{H36B}, 01524 and 01523.

72. The immunogenic composition claim 1 further comprising one or more polypeptides not selected from an adhesin island.

73. The immunogenic composition of claim 72 wherein the one or more polypeptides are selected from the group consisting of: GBS293, GBS65, GBS97, GBS276, GBS84, GBS322, GBS147 and GBS325.

74. The immunogenic composition of claim 1 wherein the composition further comprising one or more immunoregulatory agents.

75. The immunogenic composition of claim 74 wherein the one or more immunoregulatory agents include an adjuvant.

76. The immunogenic composition of claim 1 which is a vaccine.

77. A method for making a composition comprising one or both of GBS59^{DK21} and GBS59^{CJB110} polypeptides or fragments thereof comprising bringing into association: (a) an immunological effective amount of one or both GBS59^{DK21} and GBS59^{CJB110} polypeptides; and (b) a pharmaceutically acceptable excipient.

78. A modified Gram positive bacterium adapted to produce increased levels of AI surface protein.

79. The modified Gram positive bacterium of claim 78 wherein the AI surface protein is in oligomeric form.

80. The modified Gram positive bacterium of claim 79 wherein the oligomeric form is a hyperoligomer.

81. The modified Gram positive bacterium of claim 78 which is a non-pathogenic Gram positive bacterium.

82. The modified Gram positive bacterium of claim 81 wherein the non-pathogenic Gram positive bacterium is Lactococcus lactis or S. gordonii.

83. A method for manufacturing an oligomeric adhesin island (AI) surface antigen comprising:
culturing a Gram positive bacterium that expresses an oligomeric AI surface antigen; and
isolating the expressed oligomeric AI surface antigen.

84. A method for manufacturing an oligomeric adhesin island (AI) surface antigen comprising:
culturing the Gram positive bacterium of claim 78; and
isolating the expressed oligomeric AI surface antigen.

85. A method of neutralizing a Streptococcal infection in a mammal comprising the step of administering to the mammal an effective amount of the immunogenic composition of claim 1 or antibodies which recognize the an immunogenic composition of claim 1.

86. The method of claim 85 wherein the Streptococcal infection is a GBS infection.

87. The method of claim 85 wherein the Streptococcal infection is a GAS infection.

88. The method of claim 85 wherein the Streptococcal infection is a S. pneumoniae infection.

89. A method of raising an immune response in a mammal against a Streptococcal infection comprising administering to the mammal an effective amount of the immunogenic composition claim 1 or antibodies which recognize the an immunogenic composition of claim 1.

90. The method of claim 89 wherein the Streptococcal infection is a GBS infection.

91. The method of claim 89 wherein the Streptococcal infection is a GAS infection.

92. The method of claim 89 wherein the Streptococcal infection is a S. pneumoniae infection.

93-95. (canceled)

The application's sequence listing, which the Patent Office published only in electronic form, follows.

SEQUENCE LISTING (750 sequences)

SEQ ID NO: 1 - DNA, 1662 bp, Streptococcus agalactiae
atgaaattatcgaagaagttattgttttcggctgctgttttaacaatggtggcggggtcaactgttgaaccagtagctcagtttgcgactggaatgagtattgtaagagctgcagaagtgtcacaagaacgcccagcgaaaacaacagtaaatatctataaattacaagctgatagttataaatcggaaattacttctaatggtggtatcgagaataaagacggcgaagtaatatctaactatgctaaacttggtgacaatgtaaaaggtttgcaaggtgtacagtttaaacgttataaagtcaagacggatatttctgttgatgaattgaaaaaattgacaacagttgaagcagcagatgcaaaagttggaacgattcttgaagaaggtgtcagtctacctcaaaaaactaatgctcaaggtttggtcgtcgatgctctggattcaaaaagtaatgtgagatacttgtatgtagaagatttaaagaattcaccttcaaacattaccaaagcttatgctgtaccgtttgtgttggaattaccagttgctaactctacaggtacaggtttcctttctgaaattaatatttaccctaaaaacgttgtaactgatgaaccaaaaacagataaagatgttaaaaaattaggtcaggacgatgcaggttatacgattggtgaagaattcaaatggttcttgaaatctacaatccctgccaatttaggtgactatgaaaaatttgaaattactgataaatttgcagatggcttgacttataaatctgttggaaaaatcaagattggttcgaaaacactgaatagagatgagcactacactattgatgaaccaacagttgataaccaaaatacattaaaaattacgtttaaaccagagaaatttaaagaaattgctgagctacttaaaggaatgacccttgttaaaaatcaagatgctcttgataaagctactgcaaatacagatgatgcggcatttttggaaattccagttgcatcaactattaatgaaaaagcagttttaggaaaagcaattgaaaatacttttgaacttcaatatgaccatactcctgataaagctgacaatccaaaaccatctaatcctccaagaaaaccagaagttcatactggtgggaaacgatttgtaaagaaagactcaacagaaacacaaacactaggtggtgctgagtttgatttgttggcttctgatgggacagcagtaaaatggacagatgctcttattaaagcgaatactaataaaaactatattgctggagaagctgttactgggcaaccaatcaaattgaaatcacatacagacggtacgtttgagattaaaggtttggcttatgcagttgatgcgaatgcagagggtacagcagtaacttacaaattaaaagaaacaaaagcaccagaaggttatgtaatccctgataaagaaatcgagtttacagtatcacaaacatcttataatacaaaaccaactgacatcacggttgatagtgctgatgcaacacctgatacaattaaaaacaacaaacgtccttcaatccctaatactggtggtattggtacggctatctttgtcgctatcggtgctgcggtgatggcttttgctgttaaggggatgaagcgtcgtacaaaagataac

SEQ ID NO: 2 - protein, 554 aa, Streptococcus agalactiae
MKLSKKLLFSAAVLTMVAGSTVEPVAQFATGMSIVRAAEVSQERPAKTTVNIYKLQADSYKSEITSNGGIENKDGEVISNYAKLGDNVKGLQGVQFKRYKVKTDISVDELKKLTTVEAADAKVGTILEEGVSLPQKTNAQGLVVDALDSKSNVRYLYVEDLKNSPSNITKAYAVPFVLELPVANSTGTGFLSEINIYPKNVVTDEPKTDKDVKKLGQDDAGYTIGEEFKWFLKSTIPANLGDYEKFEITDKFADGLTYKSVGKIKIGSKTLNRDEHYTIDEPTVDNQNTLKITFKPEKFKEIAELLKGMTLVKNQDALDKATANTDDAAFLEIPVASTINEKAVLGKAIENTFELQYDHTPDKADNPKPSNPPRKPEVHTGGKRFVKKDSTETQTLGGAEFDLLASDGTAVKWTDALIKANTNKNYIAGEAVTGQPIKLKSHTDGTFEIKGLAYAVDANAEGTAVTYKLKETKAPEGYVIPDKEIEFTVSQTSYNTKPTDITVDSADATPDTIKNNKRPSIPNTGGIGTAIFVAIGAAVMAFAVKGMKRRTKDN

SEQ ID NO: 3 - protein, 517 aa, Streptococcus agalactiae
AEVSQERPAKTTVNIYKLQADSYKSEITSNGGIENKDGEVISNYAKLGDNVKGLQGVQFKRYKVKTDISVDELKKLTTVEAADAKVGTILEEGVSLPQKTNAQGLVVDALDSKSNVRYLYVEDLKNSPSNITKAYAVPFVLELPVANSTGTGFLSEINIYPKNVVTDEPKTDKDVKKLGQDDAGYTIGEEFKWFLKSTIPANLGDYEKFEITDKFADGLTYKSVGKIKIGSKTLNRDEHYTIDEPTVDNQNTLKITFKPEKFKEIAELLKGMTLVKNQDALDKATANTDDAAFLEIPVASTINEKAVLGKAIENTFELQYDHTPDKADNPKPSNPPRKPEVHTGGKRFVKKDSTETQTLGGAEFDLLASDGTAVKWTDALIKANTNKNYIAGEAVTGQPIKLKSHTDGTFEIKGLAYAVDANAEGTAVTYKLKETKAPEGYVIPDKEIEFTVSQTSYNTKPTDITVDSADATPDTIKNNKRPSIPNTGGIGTAIFVAIGAAVMAFAVKGMKRRTKDN

SEQ ID NO: 4 - protein, 525 aa, Streptococcus agalactiae
MKLSKKLLFSAAVLTMVAGSTVEPVAQFATGMSIVRAAEVSQERPAKTTVNIYKLQADSYKSEITSNGGIENKDGEVISNYAKLGDNVKGLQGVQFKRYKVKTDISVDELKKLTTVEAADAKVGTILEEGVSLPQKTNAQGLVVDALDSKSNVRYLYVEDLKNSPSNITKAYAVPFVLELPVANSTGTGFLSEINIYPKNVVTDEPKTDKDVKKLGQDDAGYTIGEEFKWFLKSTIPANLGDYEKFEITDKFADGLTYKSVGKIKIGSKTLNRDEHYTIDEPTVDNQNTLKITFKPEKFKEIAELLKGMTLVKNQDALDKATANTDDAAFLEIPVASTINEKAVLGKAIENTFELQYDHTPDKADNPKPSNPPRKPEVHTGGKRFVKKDSTETQTLGGAEFDLLASDGTAVKWTDALIKANTNKNYIAGEAVTGQPIKLKSHTDGTFEIKGLAYAVDANAEGTAVTYKLKETKAPEGYVIPDKEIEFTVSQTSYNTKPTDITVDSADATPDTIKNNKRPSIPNTG

SEQ ID NO: 5 - protein, 5 aa, Streptococcus agalactiae
IPNTG

SEQ ID NO: 6 - protein, 520 aa, Streptococcus agalactiae
MKLSKKLLFSAAVLTMVAGSTVEPVAQFATGMSIVRAAEVSQERPAKTTVNIYKLQADSYKSEITSNGGIENKDGEVISNYAKLGDNVKGLQGVQFKRYKVKTDISVDELKKLTTVEAADAKVGTILEEGVSLPQKTNAQGLVVDALDSKSNVRYLYVEDLKNSPSNITKAYAVPFVLELPVANSTGTGFLSEINIYPKNVVTDEPKTDKDVKKLGQDDAGYTIGEEFKWFLKSTIPANLGDYEKFEITDKFADGLTYKSVGKIKIGSKTLNRDEHYTIDEPTVDNQNTLKITFKPEKFKEIAELLKGMTLVKNQDALDKATANTDDAAFLEIPVASTINEKAVLGKAIENTFELQYDHTPDKADNPKPSNPPRKPEVHTGGKRFVKKDSTETQTLGGAEFDLLASDGTAVKWTDALIKANTNKNYIAGEAVTGQPIKLKSHTDGTFEIKGLAYAVDANAEGTAVTYKLKETKAPEGYVIPDKEIEFTVSQTSYNTKPTDITVDSADATPDTIKNNKRPS

SEQ ID NO: 7 - protein, 483 aa, Streptococcus agalactiae
AEVSQERPAKTTVNIYKLQADSYKSEITSNGGIENKDGEVISNYAKLGDNVKGLQGVQFKRYKVKTDISVDELKKLTTVEAADAKVGTILEEGVSLPQKTNAQGLVVDALDSKSNVRYLYVEDLKNSPSNITKAYAVPFVLELPVANSTGTGFLSEINIYPKNVVTDEPKTDKDVKKLGQDDAGYTIGEEFKWFLKSTIPANLGDYEKFEITDKFADGLTYKSVGKIKIGSKTLNRDEHYTIDEPTVDNQNTLKITFKPEKFKEIAELLKGMTLVKNQDALDKATANTDDAAFLEIPVASTINEKAVLGKAIENTFELQYDHTPDKADNPKPSNPPRKPEVHTGGKRFVKKDSTETQTLGGAEFDLLASDGTAVKWTDALIKANTNKNYIAGEAVTGQPIKLKSHTDGTFEIKGLAYAVDANAEGTAVTYKLKETKAPEGYVIPDKEIEFTVSQTSYNTKPTDITVDSADATPDTIKNNKRPS

SEQ ID NO: 8 - protein, 271 aa, Streptococcus agalactiae
AEVSQERPAKTTVNIYKLQADSYKSEITSNGGIENKDGEVISNYAKLGDNVKGLQGVQFKRYKVKTDISVDELKKLTTVEAADAKVGTILEEGVSLPQKTNAQGLVVDALDSKSNVRYLYVEDLKNSPSNITKAYAVPFVLELPVANSTGTGFLSEINIYPKNVVTDEPKTDKDVKKLGQDDAGYTIGEEFKWFLKSTIPANLGDYEKFEITDKFADGLTYKSVGKIKIGSKTLNRDEHYTIDEPTVDNQNTLKITFKPEKFKEIAELLKG

SEQ ID NO: 9 - protein, 212 aa, Streptococcus agalactiae
MTLVKNQDALDKATANTDDAAFLEIPVASTINEKAVLGKAIENTFELQYDHTPDKADNPKPSNPPRKPEVHTGGKRFVKKDSTETQTLGGAEFDLLASDGTAVKWTDALIKANTNKNYIAGEAVTGQPIKLKSHTDGTFEIKGLAYAVDANAEGTAVTYKLKETKAPEGYVIPDKEIEFTVSQTSYNTKPTDITVDSADATPDTIKNNKRPS

SEQ ID NO: 10 - DNA, 2670 bp, Streptococcus agalactiae
atgaaaaagagacaaaaaatatggagagggttatcagttactttactaatcctgtcccaaattccatttggtatattggtacaaggtgaaacccaagataccaatcaagcacttggaaaagtaattgttaaaaaaacgggagacaatgctacaccattaggcaaagcgacttttgtgttaaaaaatgacaatgataagtcagaaacaagtcacgaaacggtagagggttctggagaagcaacctttgaaaacataaaacctggagactacacattaagagaagaaacagcaccaattggttataaaaaaactgataaaacctggaaagttaaagttgcagataacggagcaacaataatcgagggtatggatgcagataaagcagagaaacgaaaagaagttttgaatgcccaatatccaaaatcagctatttatgaggatacaaaagaaaattacccattagttaatgtagagggttccaaagttggtgaacaatacaaagcattgaatccaataaatggaaaagatggtcgaagagagattgctgaaggttggttatcaaaaaaaattacaggggtcaatgatctcgataagaataaatataaaattgaattaactgttgagggtaaaaccactgttgaaacgaaagaacttaatcaaccactagatgtcgttgtgctattagataattcaaatagtatgaataatgaaagagccaataattctcaaagagcattaaaagctggggaagcagttgaaaagctgattgataaaattacatcaaataaagacaatagagtagctcttgtgacatatgcctcaaccatttttgatggtactgaagcgaccgtatcaaagggagttgccgatcaaaatggtaaagcgctgaatgatagtgtatcatgggattatcataaaactacttttacagcaactacacataattacagttatttaaatttaacaaatgatgctaacgaagttaatattctaaagtcaagaattccaaaggaagcggagcatataaatggggatcgcacgctctatcaatttggtgcgacatttactcaaaaagctctaatgaaagcaaatgaaattttagagacacaaagttctaatgctagaaaaaaacttatttttcacgtaactgatggtgtccctacgatgtcttatgccataaattttaatccttatatatcaacatcttaccaaaaccagtttaattcttttttaaataaaataccagatagaagtggtattctccaagaggattttataatcaatggtgatgattatcaaatagtaaaaggagatggagagagttttaaactgttttcggatagaaaagttcctgttactggaggaacgacacaagcagcttatcgagtaccgcaaaatcaactctctgtaatgagtaatgagggatatgcaattaatagtggatatatttatctctattggagagattacaactgggtctatccatttgatcctaagacaaagaaagtttctgcaacgaaacaaatcaaaactcatggtgagccaacaacattatactttaatggaaatataagacctaaaggttatgacatttttactgttgggattggtgtaaacggagatcctggtgcaactcctcttgaagctgagaaatttatgcaatcaatatcaagtaaaacagaaaattatactaatgttgatgatacaaataaaatttatgatgagctaaataaatactttaaaacaattgttgaggaaaaacattctattgttgatggaaatgtgactgatcctatgggagagatgattgaattccaattaaaaaatggtcaaagttttacacatgatgattacgttttggttggaaatgatggcagtcaattaaaaaatggtgtggctcttggtggaccaaacagtgatgggggaattttaaaagatgttacagtgacttatgataagacatctcaaaccatcaaaatcaatcatttgaacttaggaagtggacaaaaagtagttcttacctatgatgtacgtttaaaagataactatataagtaacaaattttacaatacaaataatcgtacaacgctaagtccgaagagtgaaaaagaaccaaatactattcgtgatttcccaattcccaaaattcgtgatgttcgtgagtttccggtactaaccatcagtaatcagaagaaaatgggtgaggttgaatttattaaagttaataaagacaaacattcagaatcgcttttgggagctaagtttcaacttcagatagaaaaagatttttctgggtataagcaatttgttccagagggaagtgatgttacaacaaagaatgatggtaaaatttattttaaagcacttcaagatggtaactataaattatatgaaatttcaagtccagatggctatatagaggttaaaacgaaacctgttgtgacatttacaattcaaaatggagaagttacgaacctgaaagcagatccaaatgctaataaaaatcaaatcgggtatcttgaaggaaatggtaaacatcttattaccaacactcccaaacgcccaccaggtgtttttcctaaaacagggggaattggtacaattgtctatatattagttggttctacttttatgatacttaccatttgttctttccgtcgtaaacaattg

SEQ ID NO: 11 - protein, 890 aa, Streptococcus agalactiae
MKKRQKIWRGLSVTLLILSQIPFGILVQGETQDTNQALGKVIVKKTGDNATPLGKATFVLKNDNDKSETSHETVEGSGEATFENIKPGDYTLREETAPIGYKKTDKTWKVKVADNGATIIEGMDADKAEKRKEVLNAQYPKSAIYEDTKENYPLVNVEGSKVGEQYKALNPINGKDGRREIAEGWLSKKITGVNDLDKNKYKIELTVEGKTTVETKELNQPLDVVVLLDNSNSMNNERANNSQRALKAGEAVEKLIDKITSNKDNRVALVTYASTIFDGTEATVSKGVADQNGKALNDSVSWDYHKTTFTATTHNYSYLNLTNDANEVNILKSRIPKEAEHINGDRTLYQFGATFTQKALMKANEILETQSSNARKKLIFHVTDGVPTMSYAINFNPYISTSYQNQFNSFLNKIPDRSGILQEDFIINGDDYQIVKGDGESFKLFSDRKVPVTGGTTQAAYRVPQNQLSVMSNEGYAINSGYIYLYWRDYNWVYPFDPKTKKVSATKQIKTHGEPTTLYFNGNIRPKGYDIFTVGIGVNGDPGATPLEAEKFMQSISSKTENYTNVDDTNKIYDELNKYFKTIVEEKHSIVDGNVTDPMGEMIEFQLKNGQSFTHDDYVLVGNDGSQLKNGVALGGPNSDGGILKDVTVTYDKTSQTIKINHLNLGSGQKVVLTYDVRLKDNYISNKFYNTNNRTTLSPKSEKEPNTIRDFPIPKIRDVREFPVLTISNQKKMGEVEFIKVNKDKHSESLLGAKFQLQIEKDFSGYKQFVPEGSDVTTKNDGKIYFKALQDGNYKLYEISSPDGYIEVKTKPVVTFTIQNGEVTNLKADPNANKNQIGYLEGNGKHLITNTPKRPPGVFPKTGGIGTIVYILVGSTFMILTICSFRRKQL

SEQ ID NO: 12 - protein, 862 aa, Streptococcus agalactiae
GETQDTNQALGKVIVKKTGDNATPLGKATFVLKNDNDKSETSHETVEGSGEATFENIKPGDYTLREETAPIGYKKTDKTWKVKVADNGATIIEGMDADKAEKRKEVLNAQYPKSAIYEDTKENYPLVNVEGSKVGEQYKALNPINGKDGRREIAEGWLSKKITGVNDLDKNKYKIELTVEGKTTVETKELNQPLDVVVLLDNSNSMNNERANNSQRALKAGEAVEKLIDKITSNKDNRVALVTYASTIFDGTEATVSKGVADQNGKALNDSVSWDYHKTTFTATTHNYSYLNLTNDANEVNILKSRIPKEAEHINGDRTLYQFGATFTQKALMKANEILETQSSNARKKLIFHVTDGVPTMSYAINFNPYISTSYQNQFNSFLNKIPDRSGILQEDFIINGDDYQIVKGDGESFKLFSDRKVPVTGGTTQAAYRVPQNQLSVMSNEGYAINSGYIYLYWRDYNWVYPFDPKTKKVSATKQIKTHGEPTTLYFNGNIRPKGYDIFTVGIGVNGDPGATPLEAEKFMQSISSKTENYTNVDDTNKIYDELNKYFKTIVEEKHSIVDGNVTDPMGEMIEFQLKNGQSFTHDDYVLVGNDGSQLKNGVALGGPNSDGGILKDVTVTYDKTSQTIKINHLNLGSGQKVVLTYDVRLKDNYISNKFYNTNNRTTLSPKSEKEPNTIRDFPIPKIRDVREFPVLTISNQKKMGEVEFIKVNKDKHSESLLGAKFQLQIEKDFSGYKQFVPEGSDVTTKNDGKIYFKALQDGNYKLYEISSPDGYIEVKTKPVVTFTIQNGEVTNLKADPNANKNQIGYLEGNGKHLITNTPKRPPGVFPKTGGIGTIVYILVGSTFMILTICSFRRKQL

SEQ ID NO: 13 - protein, 851 aa, Streptococcus agalactiae
MKKRQKIWRGLSVTLLILSQIPFGILVQGETQDTNQALGKVIVKKTGDNATPLGKATFVLKNDNDKSETSHETVEGSGEATFENIKPGDYTLREETAPIGYKKTDKTWKVKVADNGATIIEGMDADKAEKRKEVLNAQYPKSAIYEDTKENYPLVNVEGSKVGEQYKALNPINGKDGRREIAEGWLSKKITGVNDLDKNKYKIELTVEGKTTVETKELNQPLDVVVLLDNSNSMNNERANNSQRALKAGEAVEKLIDKITSNKDNRVALVTYASTIFDGTEATVSKGVADQNGKALNDSVSWDYHKTTFTATTHNYSYLNLTNDANEVNILKSRIPKEAEHINGDRTLYQFGATFTQKALMKANEILETQSSNARKKLIFHVTDGVPTMSYAINFNPYISTSYQNQFNSFLNKIPDRSGILQEDFIINGDDYQIVKGDGESFKLFSDRKVPVTGGTTQAAYRVPQNQLSVMSNEGYAINSGYIYLYWRDYNWVYPFDPKTKKVSATKQIKTHGEPTTLYFNGNIRPKGYDIFTVGIGVNGDPGATPLEAEKFMQSISSKTENYTNVDDTNKIYDELNKYFKTIVEEKHSIVDGNVTDPMGEMIEFQLKNGQSFTHDDYVLVGNDGSQLKNGVALGGPNSDGGILKDVTVTYDKTSQTIKINHLNLGSGQKVVLTYDVRLKDNYISNKFYNTNNRTTLSPKSEKEPNTIRDFPIPKIRDVREFPVLTISNQKKMGEVEFIKVNKDKHSESLLGAKFQLQIEKDFSGYKQFVPEGSDVTTKNDGKIYFKALQDGNYKLYEISSPDGYIEVKTKPVVTFTIQNGEVTNLKADPNANKNQIGYLEGNGKHLITNT

SEQ ID NO: 14 - protein, 823 aa, Streptococcus agalactiae
GETQDTNQALGKVIVKKTGDNATPLGKATFVLKNDNDKSETSHETVEGSGEATFENIKPGDYTLREETAPIGYKKTDKTWKVKVADNGATIIEGMDADKAEKRKEVLNAQYPKSAIYEDTKENYPLVNVEGSKVGEQYKALNPINGKDGRREIAEGWLSKKITGVNDLDKNKYKIELTVEGKTTVETKELNQPLDVVVLLDNSNSMNNERANNSQRALKAGEAVEKLIDKITSNKDNRVALVTYASTIFDGTEATVSKGVADQNGKALNDSVSWDYHKTTFTATTHNYSYLNLTNDANEVNILKSRIPKEAEHINGDRTLYQFGATFTQKALMKANEILETQSSNARKKLIFHVTDGVPTMSYAINFNPYISTSYQNQFNSFLNKIPDRSGILQEDFIINGDDYQIVKGDGESFKLFSDRKVPVTGGTTQAAYRVPQNQLSVMSNEGYAINSGYIYLYWRDYNWVYPFDPKTKKVSATKQIKTHGEPTTLYFNGNIRPKGYDIFTVGIGVNGDPGATPLEAEKFMQSISSKTENYTNVDDTNKIYDELNKYFKTIVEEKHSIVDGNVTDPMGEMIEFQLKNGQSFTHDDYVLVGNDGSQLKNGVALGGPNSDGGILKDVTVTYDKTSQTIKINHLNLGSGQKVVLTYDVRLKDNYISNKFYNTNNRTTLSPKSEKEPNTIRDFPIPKIRDVREFPVLTISNQKKMGEVEFIKVNKDKHSESLLGAKFQLQIEKDFSGYKQFVPEGSDVTTKNDGKIYFKALQDGNYKLYEISSPDGYIEVKTKPVVTFTIQNGEVTNLKADPNANKNQIGYLEGNGKHLITNT

SEQ ID NO: 15 - DNA, 2703 bp, Streptococcus agalactiae
atgagaaaataccaaaaattttctaaaatattgacgttaagtcttttttgtttgtcgcaaataccgcttaataccaatgttttaggggaaagtaccgtaccggaaaatggtgctaaaggaaagttagttgttaaaaagacagatgaccagaacaaaccactttcaaaagctacctttgttttaaaaactactgctcatccagaaagtaaaatagaaaaagtaactgctgagctaacaggtgaagctacttttgataatctcatacctggagattatactttatcagaagaaacagcgcccgaaggttataaaaagactaaccagacttggcaagttaaggttgagagtaatggaaaaactacgatacaaaatagtggtgataaaaattccacaattggacaaaatcaggaagaactagataagcagtatccccccacaggaatttatgaagatacaaaggaatcttataaacttgagcatgttaaaggttcagttccaaatggaaagtcagaggcaaaagcagttaacccatattcaagtgaaggtgagcatataagagaaattccagagggaacattatctaaacgtatttcagaagtaggtgatttagctcataataaatataaaattgagttaactgtcagtggaaaaaccatagtaaaaccagtggacaaacaaaagccgttagatgttgtcttcgtactcgataattctaactcaatgaataacgatggcccaaattttcaaaggcataataaagccaagaaagctgccgaagctcttgggaccgcagtaaaagatattttaggagcaaacagtgataatagggttgcattagttacctatggttcagatatttttgatggtaggagtgtagatgtcgtaaaaggatttaaagaagatgataaatattatggccttcaaactaagttcacaattcagacagagaattatagtcataaacaattaacaaataatgctgaagagattataaaaaggattccgacagaagctcctaaagctaagtggggatctactaccaatggattaactccagagcaacaaaaggagtactatcttagtaaagtaggagaaacatttactatgaaagccttcatggaggcagatgatattttgagtcaagtaaatcgaaatagtcaaaaaattattgttcatgtaactgatggtgttcctacgagatcatatgctattaataattttaaactgggtgcatcatatgaaagccaatttgaacaaatgaaaaaaaatggatatctaaataaaagtaattttctacttactgataagcccgaggatataaaaggaaatggggagagttactttttgtttcccttagatagttatcaaacacagataatctctggaaacttacaaaaacttcattatttagatttaaatcttaattaccctaaaggtacaatttatcgaaatggaccagtgaaagaacatggaacaccaaccaaactttatataaatagtttaaaacagaaaaattatgacatttttaattttggtatcgatatatctggttttagacaagtttataatgaggagtataagaaaaatcaagatggtacttttcaaaaattgaaagaggaagcttttaaactttcagatggagaaatcacagaactaatgaggtcgttctcttccaaacctgagtactacacccctatcgtaacttcagccgatacatctaacaatgaaattttatctaaaattcagcaacaatttgaaacgattttaacaaaagaaaactcaattgttaatggaactatcgaagatcctatgggtgataaaatcaatttacagcttggtaatggacaaacattacagccaagtgattatactttacagggaaatgatggaagtgtaatgaaggatggtattgcaactggtgggcctaataatgatggtggaatacttaagggggttaaattagaatacatcggaaataaactctatgttagaggtttgaatttaggagaaggtcaaaaagtaacactcacatatgatgtgaaactagatgacagttttataagtaacaaattctatgacactaatggtagaacaacattgaatcctaagtcagaggatcctaatacacttagagattttccaatccctaaaattcgtgatgtgagagaatatcctacaataacgattaaaaacgagaagaagttaggtgaaattgaatttataaaagttgataaagataataataagttgcttctcaaaggagctacgtttgaacttcaagaatttaatgaagattataaactttatttaccaataaaaaataataattcaaaagtagtgacgggagaaaacggcaaaatttcttacaaagatttgaaagatggcaaatatcagttaatagaagcagtttcgccggaggattatcaaaaaattactaataaaccaattttaacttttgaagtggttaaaggatcgataaaaaatataatagctgttaataaacagatttctgaatatcatgaggaaggtgacaagcatttaattaccaacacgcatattccaccaaaaggaattattcctatgacaggtgggaaaggaattctatctttcattttaataggtggagctatgatgtctattgcaggtggaatttatatttggaaaaggtataagaaatctagtgatatgtccatcaaaaaagat

SEQ ID NO: 16 - protein, 901 aa, Streptococcus agalactiae
MRKYQKFSKILTLSLFCLSQIPLNTNVLGESTVPENGAKGKLVVKKTDDQNKPLSKATFVLKTTAHPESKIEKVTAELTGEATFDNLIPGDYTLSEETAPEGYKKTNQTWQVKVESNGKTTIQNSGDKNSTIGQNQEELDKQYPPTGIYEDTKESYKLEHVKGSVPNGKSEAKAVNPYSSEGEHIREIPEGTLSKRISEVGDLAHNKYKIELTVSGKTIVKPVDKQKPLDVVFVLDNSNSMNNDGPNFQRHNKAKKAAEALGTAVKDILGANSDNRVALVTYGSDIFDGRSVDVVKGFKEDDKYYGLQTKFTIQTENYSHKQLTNNAEEIIKRIPTEAPKAKWGSTTNGLTPEQQKEYYLSKVGETFTMKAFMEADDILSQVNRNSQKIIVHVTDGVPTRSYAINNFKLGASYESQFEQMKKNGYLNKSNFLLTDKPEDIKGNGESYFLFPLDSYQTQIISGNLQKLHYLDLNLNYPKGTIYRNGPVKEHGTPTKLYINSLKQKNYDIFNFGIDISGFRQVYNEEYKKNQDGTFQKLKEEAFKLSDGEITELMRSFSSKPEYYTPIVTSADTSNNEILSKIQQQFETILTKENSIVNGTIEDPMGDKINLQLGNGQTLQPSDYTLQGNDGSVMKDGIATGGPNNDGGILKGVKLEYIGNKLYVRGLNLGEGQKVTLTYDVKLDDSFISNKFYDTNGRTTLNPKSEDPNTLRDFPIPKIRDVREYPTITIKNEKKLGEIEFIKVDKDNNKLLLKGATFELQEFNEDYKLYLPIKNNNSKVVTGENGKISYKDLKDGKYQLIEAVSPEDYQKITNKPILTFEVVKGSIKNIIAVNKQISEYHEEGDKHLITNTHIPPKGIIPMTGGKGILSFILIGGAMMSIAGGIYIWKRYKKSSDMSIKKD

SEQ ID NO: 17 - protein, 869 aa, Streptococcus agalactiae
MRKYQKFSKILTLSLFCLSQIPLNTNVLGESTVPENGAKGKLVVKKTDDQNKPLSKATFVLKTTAHPESKIEKVTAELTGEATFDNLIPGDYTLSEETAPEGYKKTNQTWQVKVESNGKTTIQNSGDKNSTIGQNQEELDKQYPPTGIYEDTKESYKLEHVKGSVPNGKSEAKAVNPYSSEGEHIREIPEGTLSKRISEVGDLAHNKYKIELTVSGKTIVKPVDKQKPLDVVFVLDNSNSMNNDGPNFQRHNKAKKAAEALGTAVKDILGANSDNRVALVTYGSDIFDGRSVDVVKGFKEDDKYYGLQTKFTIQTENYSHKQLTNNAEEIIKRIPTEAPKAKWGSTTNGLTPEQQKEYYLSKVGETFTMKAFMEADDILSQVNRNSQKIIVHVTDGVPTRSYAINNFKLGASYESQFEQMKKNGYLNKSNFLLTDKPEDIKGNGESYFLFPLDSYQTQIISGNLQKLHYLDLNLNYPKGTIYRNGPVKEHGTPTKLYINSLKQKNYDIFNFGIDISGFRQVYNEEYKKNQDGTFQKLKEEAFKLSDGEITELMRSFSSKPEYYTPIVTSADTSNNEILSKIQQQFETILTKENSIVNGTIEDPMGDKINLQLGNGQTLQPSDYTLQGNDGSVMKDGIATGGPNNDGGILKGVKLEYIGNKLYVRGLNLGEGQKVTLTYDVKLDDSFISNKFYDTNGRTTLNPKSEDPNTLRDFPIPKIRDVREYPTITIKNEKKLGEIEFIKVDKDNNKLLLKGATFELQEFNEDYKLYLPIKNNNSKVVTGENGKISYKDLKDGKYQLIEAVSPEDYQKITNKPILTFEVVKGSIKNIIAVNKQISEYHEEGDKHLITNTHIPPKGIIPMTGGKGILS

SEQ ID NO: 18 - protein, 5 aa, Streptococcus agalactiae
IPMTG

SEQ ID NO: 19 - protein, 858 aa, Streptococcus agalactiae
MRKYQKFSKILTLSLFCLSQIPLNTNVLGESTVPENGAKGKLVVKKTDDQNKPLSKATFVLKTTAHPESKIEKVTAELTGEATFDNLIPGDYTLSEETAPEGYKKTNQTWQVKVESNGKTTIQNSGDKNSTIGQNQEELDKQYPPTGIYEDTKESYKLEHVKGSVPNGKSEAKAVNPYSSEGEHIREIPEGTLSKRISEVGDLAHNKYKIELTVSGKTIVKPVDKQKPLDVVFVLDNSNSMNNDGPNFQRHNKAKKAAEALGTAVKDILGANSDNRVALVTYGSDIFDGRSVDVVKGFKEDDKYYGLQTKFTIQTENYSHKQLTNNAEEIIKRIPTEAPKAKWGSTTNGLTPEQQKEYYLSKVGETFTMKAFMEADDILSQVNRNSQKIIVHVTDGVPTRSYAINNFKLGASYESQFEQMKKNGYLNKSNFLLTDKPEDIKGNGESYFLFPLDSYQTQIISGNLQKLHYLDLNLNYPKGTIYRNGPVKEHGTPTKLYINSLKQKNYDIFNFGIDISGFRQVYNEEYKKNQDGTFQKLKEEAFKLSDGEITELMRSFSSKPEYYTPIVTSADTSNNEILSKIQQQFETILTKENSIVNGTIEDPMGDKINLQLGNGQTLQPSDYTLQGNDGSVMKDGIATGGPNNDGGILKGVKLEYIGNKLYVRGLNLGEGQKVTLTYDVKLDDSFISNKFYDTNGRTTLNPKSEDPNTLRDFPIPKIRDVREYPTITIKNEKKLGEIEFIKVDKDNNKLLLKGATFELQEFNEDYKLYLPIKNNNSKVVTGENGKISYKDLKDGKYQLIEAVSPEDYQKITNKPILTFEVVKGSIKNIIAVNKQISEYHEEGDKHLITNTHIPPKGI

SEQ ID NO: 20 - DNA, 921 bp, Streptococcus agalactiae
atgaaacaaacattaaaacttatgttttcttttctgttgatgttagggactatgtttggaattagccaaactgttttagcgcaagaaactcatcagttgacgattgttcatcttgaagcaagggatattgatcgtccaaatccacagttggagattgcccctaaagaagggactccaattgaaggagtactctatcagttgtaccaattaaaatcaactgaagatggcgatttgttggcacattggaattccctaactatcacagaattgaaaaaacaggcgcagcaggtttttgaagccactactaatcaacaaggaaaggctacatttaaccaactaccagatggaatttattatggtctggcggttaaagccggtgaaaaaaatcgtaatgtctcagctttcttggttgacttgtctgaggataaagtgatttatcctaaaatcatctggtccacaggtgagttggacttgcttaaagttggtgtggatggtgataccaaaaaaccactagcaggcgttgtctttgaactttatgaaaagaatggtaggactcctattcgtgtgaaaaatggggtgcattctcaagatattgacgctgcaaaacatttagaaacagattcatcagggcatatcagaatttccgggctcatccatggggactatgtcttaaaagaaatcgagacacagtcaggatatcagatcggacaggcagagactgctgtgactattgaaaaatcaaaaacagtaacagtaacgattgaaaataaaaaagttccgacacctaaagtgccatctcgaggaggtcttattcccaaaacaggtgagcaacaggcaatggcacttgtaattattggtggtattttaattgctttagccttacgattactatcaaaacatcggaaacatcaaaataaggat

SEQ ID NO: 21 - protein, 307 aa, Streptococcus agalactiae
MKQTLKLMFSFLLMLGTMFGISQTVLAQETHQLTIVHLEARDIDRPNPQLEIAPKEGTPIEGVLYQLYQLKSTEDGDLLAHWNSLTITELKKQAQQVFEATTNQQGKATFNQLPDGIYYGLAVKAGEKNRNVSAFLVDLSEDKVIYPKIIWSTGELDLLKVGVDGDTKKPLAGVVFELYEKNGRTPIRVKNGVHSQDIDAAKHLETDSSGHIRISGLIHGDYVLKEIETQSGYQIGQAETAVTIEKSKTVTVTIENKKVPTPKVPSRGGLIPKTGEQQAMALVIIGGILIALALRLLSKHRKHQNKD

SEQ ID NO: 22 - DNA, 918 bp, Streptococcus agalactiae
atgggacaaaaatcaaaaatatctctagctacgaatattcgtatatggatttttcgtttaattttcttagcgggtttccttgttttggcatttcccatcgttagtcaggtcatgtactttcaagcctctcacgccaatattaatgcttttaaagaagctgttaccaagattgaccgggtggagattaatcggcgtttagaacttgcttatgcttataacgccagtatagcaggtgccaaaactaatggcgaatatccagcgcttaaagacccctactctgctgaacaaaagcaggcaggggtcgttgagtacgcccgcatgcttgaagtcaaagaacaaataggtcatgtgattattccaagaattaatcaggatatccctatttacgctggctctgctgaagaaaatcttcagaggggcgttggacatttagaggggaccagtcttccagtcggtggtgagtcaactcatgccgttctaactgcccatcgagggctaccaacggccaagctatttaccaatttagacaaggtaacagtaggtgaccgtttttacattgaacacatcggcggaaagattgcttatcaggtagaccaaatcaaagttatcgcccctgatcagttagaggatttgtacgtgattcaaggagaagatcacgtcaccctattaacttgcacaccttatatgataaatagtcatcgcctcctcgttcgaggcaagcgaattccttatgtggaaaaaacagtgcagaaagattcaaagaccttcaggcaacaacaatacctaacctatgctatgtgggtagtcgttggacttatcttgctgtcgcttctcatttggtttaaaaagacgaaacagaaaaagcggagaaagaatgaaaaagcggctagtcaaaatagtcacaataattcgaaataa

SEQ ID NO: 23 - protein, 303 aa, Streptococcus agalactiae
MGQKSKISLATNIRIWIFRLIFLAGFLVLAFPIVSQVMYFQASHANINAFKEAVTKIDRVEINRRLELAYAYNASIAGAKTNGEYPALKDPYSAEQKQAGVVEYARMLEVKEQIGHVIIPRINQDIPIYAGSAEENLQRGVGHLEGTSLPVGGESTHAVLTAHRGLPTAKLFTNLDKVTVGDRFYIEHIGGKIAYQVDQIKVIAPDQLEDLYVIQGEDHVTLLTCTPYMINSHRLLVRGKRIPYVEKTVQKDSKTFRQQQYLTYAMWVVVGLILLSLLIWFKKTKQKKRRKNEKAASQNSHNN

SEQ ID NO: 24 - DNA, 783 bp, Streptococcus agalactiae
atgggaagtctgattctcttatttccgattgtgagccaggtaagttactaccttgcttcgcatcaaaatattaatcaatttaagcgggaagtcgctaagattgatactaatacggttgaacgacgcatcgctttagctaatgcttacaatgagacgttatcaaggaatcccttgcttatagacccttttaccagtaagcaaaaagaaggtttgagagagtatgctcgtatgcttgaagttcatgagcaaataggtcatgtggcaatcccaagtattggggttgatattccaatttatgctggaacatccgaaactgtgcttcagaaaggtagtgggcatttggagggaaccagtcttccagtgggaggtttgtcaacccattcagtactaactgcccaccgtggcttgccaacagctaggctatttaccgacttaaataaagttaaaaaaggccagattttctatgtgacgaacatcaaggaaacacttgcctacaaagtcgtgtctatcaaagttgtggatccaacagctttaagtgaggttaagattgtcaatggtaaggattatataaccttgctgacttgcacaccttacatgatcaatagtcatcgtctcttggtaaaaggagagcgtattccttatgattctaccgaggcggaaaagcacaaagaacaaaccgtacaagattatcgtttgtcactagtgttgaagatactactagtattattaattggactcttcatcgtgataatgatgagaagatggatgcaacatcgtcaataa

SEQ ID NO: 25 - protein, 260 aa, Streptococcus agalactiae
MGSLILLFPIVSQVSYYLASHQNINQFKREVAKIDTNTVERRIALANAYNETLSRNPLLIDPFTSKQKEGLREYARMLEVHEQIGHVAIPSIGVDIPIYAGTSETVLQKGSGHLEGTSLPVGGLSTHSVLTAHRGLPTARLFTDLNKVKKGQIFYVTNIKETLAYKVVSIKVVDPTALSEVKIVNGKDYITLLTCTPYMINSHRLLVKGERIPYDSTEAEKHKEQTVQDYRLSLVLKILLVLLIGLFIVIMMRRWMQHRQ

SEQ ID NO: 26 - DNA, 924 bp, Streptococcus agalactiae
atgaaaaagattagaaaaagtttaggacttctactatgttgctttttaggattggtacaattagcgtttttttcggtagccagtgtaaatgctgatacccctaatcaactaacaatcacacagataggacttcagccaaatactacagaggaggggatttcttatcgtttatggactgtgactgacaacttaaaagttgatttattgagccaaatgacagatagcgaattgaaccagaagtataagagtatcttgacttctcctactgatactaatggtcagacaaagatagcactcccaaatggttcgtactttggtcgtgcttataaagctgatcaaagcgtttcaacaatagtacctttttatattgaattaccagatgataagttatcaaatcaattacagataaatcctaagcgaaaagttgaaacaggccgattaaaacttattaaatatacaaaagaaggaaagataaagaaaaggctatccggagtaatatttgtattatacgataaccagaatcagccagttcgctttaaaaatggacgatttacgaccgatcaagatgggattacttcattagtaactgatgataagggagaaattgaggttgaaggtttattacctggtaagtatatttttcgagaagcaaaagcactaactggttaccgtatatctatgaaggatgctgtagttgctgtagttgctaataaaacacaggaagtagaggtagaaaacgaaaaagaaactcctccaccaacaaatcctaaaccatcacaaccgctttttccacaatcatttcttcctaaaacaggaatgattattggtggaggactgacaattcttggttgtattattttgggaattttgtttatctttttaagaaaaactaaaaatagcaaatctgaaagaaacgatacagta

SEQ ID NO: 27 - protein, 308 aa, Streptococcus agalactiae
MKKIRKSLGLLLCCFLGLVQLAFFSVASVNADTPNQLTITQIGLQPNTTEEGISYRLWTVTDNLKVDLLSQMTDSELNQKYKSILTSPTDTNGQTKIALPNGSYFGRAYKADQSVSTIVPFYIELPDDKLSNQLQINPKRKVETGRLKLIKYTKEGKIKKRLSGVIFVLYDNQNQPVRFKNGRFTTDQDGITSLVTDDKGEIEVEGLLPGKYIFREAKALTGYRISMKDAVVAVVANKTQEVEVENEKETPPPTNPKPSQPLFPQSFLPKTGMIIGGGLTILGCIILGILFIFLRKTKNSKSERNDTV

SEQ ID NO: 28 - DNA, 885 bp, Streptococcus agalactiae
atgggaggaaaatttcagaaaaaccttaagaaatcggtcgttttaaatcgatggatgaatgtaggcttgatactattgttcttagttggtcttttgataacctcatatccttttatttcaaattggtactataatattaaagctaataatcaagtaactaactttgataatcaaacccaaaaattaaatactaaagagattaatagacgatttgagttagcaaaagcttataatagaacactggacccaagccgcctatcagatccctatactgaaaaagaaaaaaaaggtattgctgaatacgcccacatgcttgagattgctgaaatgattggatatattgatataccgtctatcaagcaaaaattacctatctatgcggggactaccagtagtgttcttgaaaaaggagcaggacaccttgaaggaacctccttgccaattggtggaaaaagttcacatactgttatcacagctcatcgcggcttacctaaagctaagttatttacagatttagataaacttaaaaaaggaaaaattttttatattcataatatcaaagaagttttagcctataaggttgatcaaataagtgttgtaaagccagataatttttctaaattattggttgttaaaggtaaggattatgcgactttgctaacatgtacaccttattcgattaattcacatcgtttactagttagagggcatcgaatcaagtatgtacctcctgttaaagaaaagaactatttaatgaaagaattgcaaacacactataaactttatttcctcttatcaatcctagttattcttatattagtcgctttactattatatttaaaacgaaaatttaaagagagaaagagaaagggaaatcaaaaatga

SEQ ID NO: 29 - protein, 294 aa, Streptococcus agalactiae
MGGKFQKNLKKSVVLNRWMNVGLILLFLVGLLITSYPFISNWYYNIKANNQVTNFDNQTQKLNTKEINRRFELAKAYNRTLDPSRLSDPYTEKEKKGIAEYAHMLEIAEMIGYIDIPSIKQKLPIYAGTTSSVLEKGAGHLEGTSLPIGGKSSHTVITAHRGLPKAKLFTDLDKLKKGKIFYIHNIKEVLAYKVDQISVVKPDNFSKLLVVKGKDYATLLTCTPYSINSHRLLVRGHRIKYVPPVKEKNYLMKELQTHYKLYFLLSILVILILVALLLYLKRKFKERKRKGNQK

SEQ ID NO: 30 - DNA, 882 bp, Streptococcus agalactiae
gtgaagactaaaaaaatcatcaaaaaaacaaaaaaaaagaagaagtcaaatcttccttttatcattctttttctaataggtctatctattttattgtatccagtggtatcacgtttttactatacgatagaatctaataatcaaacacaggattttgagagagctgctaaaaaacttagtcagaaagaaatcaatcgacgtatggctctagcacaagcttataatgattctttaaataatgtccatcttgaagatccttatgagaaaaaacgaattcaaaagggggtagcagagtacgcccgtatgttagaggtaagtgaaaaaatcggaacaatttcagttcctaagataggtcaaaaactccctatatttgcaggttcaagtcaagaagttctatctaaaggagcagggcatttagaaggtacctctcttccaattgggggcaatagtacacatactgttataacagcgcattcaggaattccagataaagaactcttttctaaccttaaaaagttaaaaaaaggagataagttttatattcaaaacataaaagaaacgatagcatatcaagtagatcagataaaagtcgttacacccgataacttttcagatttgttggttgttcctggacatgattatgcaaccttattgacttgcaccccgattatgatcaatacacacagacttttagtaaggggacatcgtatcccttataaaggtcctattgatgaaaaattaataaaagacggtcatttaaacacgatttatagatatctattctatatatctttagttattattgcttggttactttggttaataaaacgtcaacgtcaaaaaaatcgtttagcaagtgttagaaaaggaattgaatcataa

SEQ ID NO: 31 - protein, 293 aa, Streptococcus agalactiae
MKTKKIIKKTKKKKKSNLPFIILFLIGLSILLYPVVSRFYYTIESNNQTQDFERAAKKLSQKEINRRMALAQAYNDSLNNVHLEDPYEKKRIQKGVAEYARMLEVSEKIGTISVPKIGQKLPIFAGSSQEVLSKGAGHLEGTSLPIGGNSTHTVITAHSGIPDKELFSNLKKLKKGDKFYIQNIKETIAYQVDQIKVVTPDNFSDLLVVPGHDYATLLTCTPIMINTHRLLVRGHRIPYKGPIDEKLIKDGHLNTIYRYLFYISLVIIAWLLWLIKRQRQKNRLASVRKGIES

SEQ ID NO: 32 - protein, 199 aa, Streptococcus agalactiae
MIRRYSANFLAILGIILVSSGIYWGWYNINQAHQADLTSQHIVKVLDKSITHQVKGSENGELPVKKLDKTDYLGTLDIPNLKLHLPVAANYSFEQLSKTPTRYYGSYLTNNMVICAHNFPYHFDALKNVDMGTDVYFTTTTGQIYHYKISNREIIEPTAIEKVYKTATSDNDWDLSLFTCTKAGVARVLVRCQLIDVKN

SEQ ID NO: 33 - protein, 223 aa, Streptococcus agalactiae
MIYKKILKITLLLLFSLSTQLVSADTNDQMKTGSITIQNKYNNQGIAGGNLLVYQVAQAKDVDGNQVFTLTTPFQGIGIKDDDLTQVNLDSNQAKYVNLLTKAVHKTQPLQTFDNLPAEGIVANNLPQGIYLFIQTKTAQGYELMSPFILSIPKDGKYDITAFEKMSPLNAKPKKEETITPTVTHQTKGKLPFTGQVWWPIPILIMSGLLCLIIALKWRRRRD

SEQ ID NO: 34 - protein, 268 aa, Streptococcus agalactiae
MAYPSLANYWNSFHQSRAIMDYQDRVTHMDENDYKKIINRAKEYNKQFKTSGMKWHMTSQERLDYNSQLAIDKTGNMGYISIPKINIKLPLYHGTSEKVLQTSIGHLEGSSLPIGGDSTHSILSGHRGLPSSRLFSDLDKLKVGDHWTVSILNETYTYQVDQIRTVKPDDLRDLQIVKGKDYQTLVTCTPYGVNTHRLLVRGHRVPNDNGNALVVAEAIQIEPIYIAPFIAIFLTLILLLISLEVTRRARQRKKILKQAMRKEENNDL

SEQ ID NO: 35 - protein, 502 aa, Streptococcus agalactiae
MKKKMIQSLLVASLAFGMAVSPVTPIAFAAETGTITVQDTQKGATYKAYKVFDAEIDNANVSDSNKDGASYLIPQGKEAEYKASTDFNSLFTTTTNGGRTYVTKKDTASANEIATWAKSISANTTPVSTVTESNNDGTEVINVSQYGYYYVSSTVNNGAVIMVTSVTPNATIHEKNTDATWGDGGGKTVDQKTYSVGDTVKYTITYKNAVNYHGTEKVYQYVIKDTMPSASVVDLNEGSYEVTITDGSGNITTLTQGSEKATGKYNLLEENNNFTITIPWAATNTPTGNTQNGANDDFFYKGINTITVTYTGVLKSGAKPGSADLPENTNIATINPNTSNDDPGQKVTVRDGQITIKKIDGSTKASLQGAIFVLKNATGQFLNFNDTNNVEWGTEANATEYTTGADGIITITGLKEGTYYLVEKKAPLGYNLLDNSQKVILGDGATDTTNSDNLLVNPTVENNKGTELPSTGGIGTTIFYIIGAILVIGAGIVLVARRRLRS

SEQ ID NO: 36 - protein, 1434 aa, Streptococcus agalactiae
MLKKCQTFIIESLKKKKHPKEWKIIMWSLMILTTFLTTYFLILPAITVEETKTDDVGITLENKNSSQVTSSTSSSQSSVEQSKPQTPASSVTETSSSEEAAYREEPLMFRGADYTVTVTLTKEAKIPKNADLKVTELKDNSATFKDYKKKALTEVAKQDSEIKNFKLYDITIESNGKEAEPQAPVKVEVNYDKPLEASDENLKVVHFKDDGQTEVLKSKDTAETKNTSSDVAFKTDSFSIYAIVQEDNTEVPRLTYHFQNNDGTDYDFLTASGMQVHHQIIKDGESLGEVGIPTIKAGEHFNGWYTYDPTTGKYGDPVKFGEPITVTETKEICVRPFMSKVATVTLYDDSAGKSILERYQVPLDSSGNGTADLSSFKVSPPTSTLLFVGWSKTQNGAPLSESEIQALPVSSDISLYPVFKESYGVEFNTGDLSTGVTYIAPRRVLTGQPASTIKPNDPTRPGYTFAGWYTAASGGAAFDFNQVLTKDTTLYAHWSPAQTTYTINYWQQSATDNKNATDAQKTYEYAGQVTRSGLSLSNQTLTQQDINDKLPTGFKVNNTRTETSVMIKDDGSSVVNVYYDRKLITIKFAKYGGYSLPEYYYSYNWSSDADTYTGLYGTTLAANGYQWKTGAWGYLANVGNNQVGTYGMSYLGEFILPNDTVDSDVIKLFPKGNIVQTYRFFKQGLDGTYSLADTGGGAGADEFTFTEKYLGFNVKYYQRLYPDNYLFDQYASQTSAGVKVPISDEYYDRYGAYHKDYLNLVVWYERNSYKIKYLDPLDNTELPNFPVKDVLYEQNLSSYAPDTTTVQPKPSRPGYVWDGKWYKDQAQTQVFDFNTTMPPHDVKVYAGWQKVTYRVNIDPNGGRLSKTDDTYLDLHYGDRIPDYTDITRDYIQDPSGTYYYKYDSRDKDPDSTKDAYYTTDTSLSNVDTTTKYKYVKDAYKLVGWYYVNPDGSIRPYNFSGAVTQDINLRAIWRKAGDYHIIYSNDAVGTDGKPALDASGQQLQTSNEPTDPDSYDDGSHSALLRRPTMPDGYRFRGWWYNGKIYNPYDSIDIDAHLADANKNITIKPVIIPVGDIKLEDTSIKYNGNGGTRVENGNVVTQVETPRMELNSTTTIPENQYFTRTGYNLIGWHHDKDLADTGRVEFTAGQSIGIDNNPDATNTLYAVWQPKEYTVRVSKTVVGLDEDKTKDFLFNPSETLQQENFPLRDGQTKEFKVPYGTSISIDEQAYDEFKVSESITEKNLATGEADKTYDATGLQSLTVSGDVDISFTNTRIKQKVRLQKVNVENDNNFLAGAVFDIYESDANGNKASHPMYSGLVTNDKGLLLVDANNYLSLPVGKYYLTETKAPPGYLLPKNDISVLVISTGVTFEQNGNNATPIKENLVDGSTVYTFKITNSKGTELPSTGGIGTHIYILVGLALALPSGLILYYRKKI

SEQ ID NO: 37 - protein, 189 aa, Streptococcus agalactiae
MKRQISSDKLSQELDRVTYQKRFWSVIKNTIYILMAVASIAILIAVLWLPVLRIYGHSMNKTLSAGDVVFTVKGSNFKTGDVVAFYYNNKVLVKRVIAESGDWVNIDSQGDVYVNQHKLKEPYVIHKALGNSNIKYPYQVPDKKIFVLGDNRKTSIDSRSTSVGDVSEEQIVGKISFRIWPLGKISSIN

SEQ ID NO: 38 - protein, 1376 aa, Streptococcus agalactiae
ATGAATAAAAAGGTACTATTGACATCGACAATGGCAGCTTCGCTATTATCAGTCGCAAGTGTTCAAGCACAAGAAACAGATACGACGTGGACAGCACGTACTGTTTCAGAGGTAAAGGCTGATTTGGTAAAGCAAGACAATAAATCATCATATACTGTGAAATATGGTGATACACTAAGCGTTATTTCAGAAGCAATGTCAATTGATATGAATGTCTTAGCAAAAATAAATAACATTGCAGATATCAATCTTATTTATCCTGAGACAACACTGACAGTAACTTACGATCAGAAGAGTCATACTGCCACTTCAATGAAAATAGAAACACCAGCAACAAATGCTGCTGGTCAAACAACAGCTACTGTGGATTTGAAAACCAATCAAGTTTCTGTTGCAGACCAAAAAGTTTCTCTCAATACAATTTCGGAAGGTATGACACCAGAAGCAGCAACAACGATTGTTTCGCCAATGAAGACATATTCTTCTGCGCCAGCTTTGAAATCAAAAGAAGTATTAGCACAAGAGCAAGCTGTTAGTCAAGCAGCAGCTAATGAACAGGTATCACCAGCTCCTGTGAAGTCGATTACTTCAGAAGTTCCAGCAGCTAAAGAGGAAGTTAAACCAACTCAGACGTCAGTCAGTCAGTCAACAACAGTATCACCAGCTTCTGTTGCCGCTGAAACACCAGCTCCAGTAGCTAAAGTAGCACCGGTAAGAACTGTAGCAGCCCCTAGAGTGGCAAGTGTTAAAGTAGTCACTCCTAAAGTAGAAACTGGTGCATCACCAGAGCATGTATCAGCTCCAGCAGTTCCTGTGACTACGACTTCACCAGCTACAGACAGTAAGTTACAAGCGACTGAAGTTAAGAGCGTTCCGGTAGCACAAAAAGCTCCAACAGCAACACCGGTAGCACAACCAGCTTCAACAACAAATGCAGTAGCTGCACATCCTGAAAATGCAGGGCTCCAACCTCATGTTGCAGCTTATAAAGAAAAAGTAGCGTCAACTTATGGAGTTAATGAATTCAGTACATACCGTGCGGGAGATCCAGGTGATCATGGTAAAGGTTTAGCAGTTGACTTTATTGTAGGTACTAATCAAGCACTTGGTAATAAAGTTGCACAGTACTCTACACAAAATATGGCAGCAAATAACATTTCATATGTTATCTGGCAACAAAAGTTTTACTCAAATACAAACAGTATTTATGGACCTGCTAATACTTGGAATGCAATGCCAGATCGTGGTGGCGTTACTGCCAACCACTATGACCACGTTCACGTATCATTTAACAAATAATATAAAAAAGGAAGCTATTTGGCTTCTTTTTTATATGCCTTGAATAGACTTTCAAGGTTCTTATATAATTTTTATTA

SEQ ID NO: 39 - protein, 432 aa, Streptococcus agalactiae
MNKKVLLTSTMAASLLSVASVQAQETDTTWTARTVSEVKADLVKQDNKSSYTVKYGDTLSVISEAMSIDMNVLAKINNIADINLIYPETTLTVTYDQKSHTATSMKIETPATNAAGQTTATVDLKTNQVSVADQKVSLNTISEGMTPEAATTIVSPMKTYSSAPALKSKEVLAQEQAVSQAAANEQVSPAPVKSITSEVPAAKEEVKPTQTSVSQSTTVSPASVAAETPAPVAKVAPVRTVAAPRVASVKVVTPKVETGASPEHVSAPAVPVTTTSPATDSKLQATEVKSVPVAQKAPTATPVAQPASTTNAVAAHPENAGLQPHVAAYKEKVASTYGVNEFSTYRAGDPGDHGKGLAVDFIVGTNQALGNKVAQYSTQNMAANNISYVIWQQKFYSNTNSIYGPANTWNAMPDRGGVTANHYDHVHVSFNK

SEQ ID NO: 40 - protein, 392 aa, Streptococcus agalactiae
DLVKQDNKSSYTVKYGDTLSVISEAMSIDMNVLAKINNIADINLIYPETTLTVTYDQKSHTATSMKIETPATNAAGQTTATVDLKTNQVSVADQKVSLNTISEGMTPEAATTIVSPMKTYSSAPALKSKEVLAQEQAVSQAAANEQVSPAPVKSITSEVPAAKEEVKPTQTSVSQSTTVSPASVAAETPAPVAKVAPVRTVAAPRVASVKVVTPKVETGASPEHVSAPAVPVTTTSPATDSKLQATEVKSVPVAQKAPTATPVAQPASTTNAVAAHPENAGLQPHVAAYKEKVASTYGVNEFSTYRAGDPGDHGKGLAVDFIVGTNQALGNKVAQYSTQNMAANNISYVIWQQKFYSNTNSIYGPANTWNAMPDRGGVTANHYDHVHVSFNK

SEQ ID NO: 41 - protein, 429 aa, Streptococcus pyogenes
MIEKYLESSIESKCQLVVLFFKTSYLPITEVAEKTGLTFLQLNHYCEELNAFFPDSLSMTIQKRMISCQFTHPFKETYLYQLYASSNVLQLLAFLIKNGSHSRPLTDFARSHFLSNSSAYRMREALIPLLRNFELKLSKNKIVGEEYRIRYLIALLYSKFGIKVYDLTQQDKNTIHSFLSHSSTHLKTSPWLSESFSFYDILLALSWKRHQFSVTIPQTRIFQQLKKLFIYDSLKKSSRDIIETYCQLNFSAGDLDYLYLIYITANNSFASLQWTPEHIRQCCQLFEENDTFRLLLKPIITLLPNLKEQKPSLVKALMFFSKSFLFNLQHFIPETNLFVSPYYKGNQKLYTSLKLIVEEWLAKLPGKRYLNHKHFHLFCHYVEQILRNIQPPLVVVFVASNFINAHLLTDSFPRYFSDKSIDFHSYIAR

SEQ ID NO: 42 - protein, 67 aa, Streptococcus pyogenes
MSLRHQNKKGIRKEGWKSRPQSRWSDHCQLVAQKSVLKQAISKTVLAERGLFSCLDDYLERHALKVN

SEQ ID NO: 43 - protein, 1036 aa, Streptococcus pyogenes
MYSRLKRELVIVINRKKKYKLIRLMVTVGLIFSQLVLPIRRLGLQMISTQTKVIPQEIVTQTETQGTQVVATKQKLESENSSLKVALKRESGFEHNATIDASLDTESQGDNSQRSVTQAIVTMALELRKQGLSIVDTKIVRIQSSTNQRNDITTTLTFKNGLSLEGASTEANDPNVRVGIVNPNDTVQTITPTIKQDADGKVKNLVFTGRLGKQVIIVSTTRLKEEQTISLDSYGELVIDGAVGLSQKDRPPYSKPITVNILKPKLSSIESSLDSKDFEIVKTIDNLYTWDDQFYLLDFISKQYEVLKTDYQSAKDSTPQTRDILFGEYTVEPLVMNKGHNNTINIYIRSTRPLGLKPIGAAPALIQPRSFRSLTPRSTRMKRSAPVEKFEGELEHHKRIDYLGDNQNNPDTTIDDKEDEHDTSDLYRLYLDMTGKKNPLDILVVVDKSGSMQEGIGSVQRYRYYAQRWDDYYSQWVYHGTFDYSSYQGESFNRGQIHYRYRGIVSVSDGIRRDDAVKNSLLGVNGLLQRFVNINPENKLSVIGFQGSADYHAGKWYPDQSPRGGFYQPNLNNSRDAELLKGWSTNSLLDPNTLTALHNNGTNYHAALLKAKEILNEVKDDGRRKIMIFISDGVPTFYFGEDGYRSGNGSSNDRNNVTRSQEGSKLAIDEFKARYPNLSIYSLGVSKDINSDTASSSPVVLKYLSGEEHYYGITDTAELEKTLNKIVEDSKLSQLGISDSLSQYVDYYDKQPDVLVTRKSKVNDETEILYQKDQVQEAGKDIIDKVVFTPKTTSQPKGKVTLTFKSDYKVDDEYTYTLSFNVKASDEAYEKYKDNEGRYSEMGDSDTDYGTNQTSSGKGGLPSNSDASVNYMADGREQKLPYKHPVIQVKTVPITFTKVDADNNQKKLAGVEFELRKEDKKIVWEKGTTGSNGQLNFKYLQKGKTYYLYETKAKLGYTLPENPWEVAVANNGDIKVKHPIEGELKSKDGSYMIKNYKIYQLPSSGGRGSQIFIIVGSMTATVALLFYRRQHRKKQY

SEQ ID NO: 44 - protein, 556 aa, Streptococcus pyogenes
MTNRRETVREKILITAKKLMLACLAILAVVGLGMTRVSALSKDDTAQLKITNIEGGPTVTLYKIGEGVYNTNGDSFINFKYAEGVSLTETGPTSQEITTIANGINTGKIKPFSTENVSISNGTATYNARGASVYIALLTGATDGRTYNPILLAASYNGEGNLVTKNIDSKSNYLYGQTSVAKSSLPSITKKVTGTIDDVNKKTTSLGSVLSYSLTFELPSYTKEAVNKTVYVSDNMSEGLTFNFNSLTVEWKGKMANITEDGSVMVENTKIGIAKEVNNGFNLSFIYDSLESISPNISYKAVVNNKAIVGEEGNPNKAEFFYSNNPTKGNTYDNLDKKPDKGNGITSKEDSKIVYTYQIAFRKVDSVSKTPLIGAIFGVYDTSNKLIDIVTTNKNGYAISTQVSSGKYKIKELKAPKGYSLNTETYEITANWVTATVKTSANSKSTTYTSDKNKATDNSEQVGWLKNGIFYSIDSRPTGNDVKEAYIESTKALTDGTTFSKSNEGSGTVLLETDIPNTKLGELPSTGSIGTYLFKAIGSAAMIGAIGIYIVKRRKA

SEQ ID NO: 45 - protein, 280 aa, Streptococcus pyogenes
MTERLKNLGILLLFLLGTAIFLYPTLSSQWNAYRDRQLLSTYHKQVIQKKPSEMEEVWQKAKAYNARLGIQPVPDAFSFRDGIHDKNYESLLQIENNDIMGYVEVPSIKVTLPIYHYTTDEVLTKGAGHLFGSALPVGGDGTHTVISAHRGLPSAEMFTNLNLVKKGDTFYFRVLNKVLAYKVDQILIVEPDQATSLSGVMGKDYATLVTCTPYGVNTKRLLVRGHRIAYHYKKYQQAKKAMKLVDKSRMWAEVVCAAFGVVIAIILVFMYSRVSAKKSK

SEQ ID NO: 46 - DNA, 1446 bp, Streptococcus pyogenes
aaagatgatactgcacaactaaagataacaaatattgaaggtgggccaacagtaacactttataaaataggagaaggtgtttacaacactaatggtgattcttttattaactttaaatatgctgagggggtttctttaactgaaacaggacctacatcacaagaaattactactattgcaaatggtattaatacgggtaaaataaagccttttagtactgaaaacgttagtatttctaatggaacagcaacttataatgcgagaggtgcatctgtttatattgcattattaacaggtgcgacagatggccgtacctacaatcctattttattagctgcatcttataatggtgagggaaatttagttactaaaaatattgattccaaatctaattatttatatggacaaacaagtgttgcaaaatcatcattaccatctattacaaagaaagtaaccgggacaatagatgacgtgaataaaaagactacctcgttaggaagtgtattgtcttattcgctgacatttgaattaccaagttataccaaagaagcagtcaataaaacagtatatgtttctgataatatgtcggaaggtcttacttttaactttaatagtcttacagtagaatggaaaggtaagatggctaatattactgaagatggttcagtaatggtagaaaatacaaaaatcggaatagctaaggaggttaataacggttttaatttaagttttatttatgatagtttagaatctatatcaccaaatataagttataaagctgttgtaaacaataaagctattgttggtgaagagggtaatcctaataaagctgaattcttctattcaaataatccaacaaaaggtaatacatacgataatttagataagaagcctgataaagggaatggtattacatccaaagaagattctaaaattgtttatacttatcaaatagcgtttagaaaagttgatagtgttagtaagaccccacttattggtgcaatttttggagtttatgatactagtaataaattaattgatattgttacaaccaataaaaatggatatgctatttcaacacaagtatcttcaggaaaatataaaattaaggaattaaaagctcctaaaggttattcattgaatacagaaacttatgaaattacggcaaattgggtaactgctacagtcaagacaagtgctaattcaaaaagtactacttatacatctgataaaaataaggcgacagataattcagagcaagtaggatggttaaaaaatggtatattctattctatagatagtagacctacaggaaatgatgttaaagaggcttatattgaatctactaaggctttaactgatggaacaactttctcaaaatcgaatgaaggttcaggtacagtattattagaaactgacatccctaacaccaagctaggtgaactc

SEQ ID NO: 47 - protein, 482 aa, Streptococcus pyogenes
KDDTAQLKITNIEGGPTVTLYKIGEGVYNTNGDSFINFKYAEGVSLTETGPTSQEITTIANGINTGKIKPFSTENVSISNGTATYNARGASVYIALLTGATDGRTYNPILLAASYNGEGNLVTKNIDSKSNYLYGQTSVAKSSLPSITKKVTGTIDDVNKKTTSLGSVLSYSLTFELPSYTKEAVNKTVYVSDNMSEGLTFNFNSLTVEWKGKMANITEDGSVMVENTKIGIAKEVNNGFNLSFIYDSLESISPNISYKAVVNNKAIVGEEGNPNKAEFFYSNNPTKGNTYDNLDKKPDKGNGITSKEDSKIVYTYQIAFRKVDSVSKTPLIGAIFGVYDTSNKLIDIVTTNKNGYAISTQVSSGKYKIKELKAPKGYSLNTETYEITANWVTATVKTSANSKSTTYTSDKNKATDNSEQVGWLKNGIFYSIDSRPTGNDVKEAYIESTKALTDGTTFSKSNEGSGTVLLETDIPNTKLGEL

SEQ ID NO: 48 - protein, 762 aa, Streptococcus pyogenes
LRGEKMKKTRFPNKLNTLNTQRVLSKNSKRFTVTLVGVFLMIFALVTSMVGAKTVFGLVESSTPNAINPDSSSEYRWYGYESYVRGHPYYKQFRVAHDLRVNLEGSRSYQVYCFNLKKAFPLGSDSSVKKWYKKHDGISTKFEDYAMSPRITGDELNQKLRAVMYNGHPQNANGIMEGLEPLNAIRVTQEAVWYYSDNAPISNPDESFKRESESNLVSTSQLSLMRQALKQLIDPNLATKMPKQVPDDFQLSIFESEDKGDKYNKGYQNLLSGGLVPTKPPTPGDPPMPPNQPQTTSVLIRKYAIGDYSKLLEGATLQLTGDNVNSFQARVFSSNDIGERIELSDGTYTLTELNSPAGYSIAEPITFKVEAGKVYTIIDGKQIENPNKEIVEPYSVEAYNDFEEFSVLTTQNYAKFYYAKNKNGSSQVVYCFNADLKSPPDSEDGGKTMTPDFTTGEVKYTHIAGRDLFKYTVKPRDTDPDTFLKHIKKVIEKGYREKGQAIEYSGLTETQLRAATQLAIYYFTDSAELDKDKLKDYHGFGDMNDSTLAVAKILVEYAQDSNPPQLTDLDFFIPNNNKYQSLIGTQWHPEDLVDIIRMEDKKEVIPVTHNLTLRKTVTGLAGDRTKDFHFEIELKNNKQELLSQTVKTDKTNLEFKDGKATINLKHGESLTLQGLPEGYSYLVKETDSEGYKVKVNSQEVANATVSKTGITSDETLAFENNKEPVVPTGVDQKINGYLALIVIAGISLGIWGIHTIRIRKHD

SEQ ID NO: 49 - protein, 131 aa, Streptococcus pyogenes
MIIKRNDMAPSVKAGDAILFYRLSQTYKVEEAVVYEDSKTSITKVGRIIAQAGDEVDLTEQGELKINGHIQNEGLTFIKSREANYPYRIADNSYLILNDYYSQESENYLQDAIAKDAIKGTINTLIRLRNH

SEQ ID NO: 50 - protein, 340 aa, Streptococcus pyogenes
MKLRHLLLTGAALTSFAATTVHGETVVNGAKLTVTKNLDLVNSNALIPNTDFTFKIEPDTTVNEDGNKFKGVALNTPMTKVTYTNSDKGGSNTKTAEFDFSEVTFEKPGVYYYKVTEEKIDKVPGVSYDTTSYTVQVHVLWNEEQQKPVATYIVGYKEGSKVPIQFKNSLDSTTLTVKKKVSGTGGDRSKDFNFGLTLKANQYYKASEKVMIEKTTKGGQAPVQTEASIDQLYHFTLKDGESIKVTNLPVGVDYVVTEDDYKSEKYTTNVEVSPQDGAVKNIAGNSTEQETSTDKDMTITFTNKKDFEVPTGVAMTVAPYIALGIVAVGGALYFVKKKNA

SEQ ID NO: 51 - protein, 237 aa, Streptococcus pyogenes
MIVRLIKLLDKLINVIVLCFFFLCLLIAALGIYDALTVYQGANATNYQQYKKKGVQFDDLLAINSDVMAWLTVKGTHIDYPIVQGENNLEYINKSVEGEYSLSGSVFLDYRNKVTFEDKYSLIYAHHMAGNVMFGELPNFRKKSFFNKHKEFSIETKTKQKLKINIFACIQTDAFDSLLFNPIDVDISSKNEFLNHIKQKSVQYREILTTNESRFVALSTCEDMTTDGRIIVIGQIE

SEQ ID NO: 52 - protein, 215 aa, Streptococcus pyogenes
MKKSILRILAIGYLLMSFCLLDSVEAENLTASINIEVINQVDVATNKQSSDIDETFMFVIEALDKESPLPNSVTTSVKGNGKTSFEQLTFSEVGQYHYKIHQLLGKNSQYHYDETVYEVVIYVLYNEQSGALETNLVSNKLGETEKSELIFKQEYSEKTPEPHQPDTTEKEKPQKKRNGILPSTGEMVSYVSALGIVLVATITLYSIYKKLKTSK

SEQ ID NO: 53 - protein, 450 aa, Streptococcus pyogenes
MTRTNYQKKRMTCPVETEDITYRRKKIKGRRQAILAQFEPELVHHELIGDSCTCPDCHGTLTEIGSVVQRQELVFIPAQLKRINHVQHAYKCQTCSDNSLSDKIIKAPVPKAPLAHSLGSASIIAHTVHQKFTLKVPNYRQEEDWNKLGLSISRKEIANWHIKSSQYYFEPLYDLLRDILLSQEVIHADETSYRVLESDTQLTYYWTFLSGKHEKKGITLYHHDKRRSGLVTQEVLGDYSGYVHCDMHGAYRQLEHAKLVGCWAHVRRKFFEATPKQADKTSLGRKGLVYCDKLFALEAEWCELPPQERLVKRKEILTPLMTTFFDWCREQVVLSGSKLGLAIAYSLKHERTFRTVLEDGHIVLSNNMAERAIKSLVMGRKNWLFSQSFEGAKAAAIIMSLLETAKRHGLNSEKYISYLLDRLPNEETLAKREVLEAYLPWAKKVQTNCQ

SEQ ID NO: 54 - protein, 116 aa, Streptococcus pyogenes
MTIRLNDLGQVYLVCGKTDMRQGIDSLAYLVKSQHELDLFSGAVYLFCGGRRDRFKALYWDGQGFWLLYKRFENGKLAWPRNRDEVKCLTAVQVDWLMKGFFISPNIKISKSHDFY

SEQ ID NO: 55 - protein, 251 aa, Streptococcus pyogenes
MECYRDRQLLSTYHKQVTQKKPSEMEEVWQKAKAYNARLGIQPVPDAFSFRDGIHDKNYESLLQIENNDIMGYVEVPSIKVTLPIYHYTTDEVLTKGAGHLFGSALPVGGDGTHTVISAHRGLPSAEMFTNLNLVKKGDTFYFRVLNKVLAYKVDQILTVEPDQVTSLSGVMGKDYATLVTCTPYGVNTKRLLVRGHRIAYHYKKYQQAKKAMKLVDKSRMWAEVVCAAFGVVIAIILVFMYSRVSAKKSK

SEQ ID NO: 56 - protein, 511 aa, Streptococcus pyogenes
MPYVKKKKDSFLVETYLEQSIRDKSELVLLLFKSPTIIFSHVAKQTGLTAVQLKYYCKELDDFFGNNLDITIKKGKIICCFVKPVKEFYLHQLYDTSTILKLLVFFIKNGTSSQPLIKFSKKYFLSSSSAYRLRESLIKLLREFGLRVSKNTIVGEEYRIRYLIAMLYSKFGIVIYPLDHLDNQIIYRFLSQSATNLRTSPWLEEPFSFYNMLLALSWKRHQFAVSIPQTRIFRQLKKLFIYDCLTRSSRQVIENAFSLTFSQGDLEYLFLIYITTNNSFASLQWTPQHIETCCHIFEKNDTFRLLLEPILKRLPQLNHSKQDLIKALMYFSKSFLFNLQHFVIEIPSFSLPTYTGNSNLYKALKNIVNQWLAQLPGKRHLNEKHLQLFCSHIEQILKNKQPALTVVLISSNFINAKLLTDTIPRYFSDKGIHFYSFYLLRDDIYQIPSLKPDLVITHSRLIPFVKNDLVKGVTVAEFSFDNPDYSIASIQNLIYQLKDKKYQDFLNEQLQ

SEQ ID NO: 57 - protein, 744 aa, Streptococcus pyogenes
MQKRDKTNYGSANNKRRQTTIGLLKVFLTFVALIGIVGFSIRAFGAEEQSVPNKQSSVQDYPWYGYDSYSKGYPDYSPLKTYHNLKVNLDGSKEYQAYCFNLTKHFPSKSDSVRSQWYKKLEGTNENFIKLADKPRIEDGQLQQNILRILYNGYPNDRNGIMKGIDPLNAILVTQNAIWYYTDSSYISDTSKAFQQEETDLKLDSQQLQLMRNALKRLINPKEVESLPNQVPANYQLSIFQSSDKTFQNLLSAEYVPDTPPKPGEEPPAKTEKTSVIIRKYAEGDYSKLLEGATLKLAQIEGSGFQEKIFDSNKSGEKVELPNGTYVLSELKPPQGYGVATPITFKVAAEKVLIKNKEGQFVENQNKEIAEPYSVTAFNDFEEIGYLSDFNNYGKFYYAKNTNGTNQVVYCFNADLHSPPDSYDHGANIDPDVSESKEIKYTHVSGYDLYKYAATPRDKDADFFLKHIKKILDKGYKKKGDTYKTLTEAQFRAATQLAIYYYTDSADLTTLKTYNDNKGYHGFDKLDDATLAVVHELITYAEDVTLPMTQNLDFFVPNSSRYQALIGTQYHPNELIDVISMEDKQAPIIPITHKLTISKTVTGTIADKKKEFNFEIHLKSSDGQAISGTYPTNSGELTVTDGKATFTLKDGESLIVEGLPSGYSYEITETGASDYEVSVNGKNAPDGKATKASVKEDETVAFENRKDLVPPTGLTTDGAIYLWLLLLVPFGLLVWLFGRKGTKK

SEQ ID NO: 58 - protein, 173 aa, Streptococcus pyogenes
MTNYLNRLNENPLLKAFIRLVLKISIIGFLGYILFQYVFGVMIVNTNQMSPAVSAGDGVLYYRLTDRYHINDVVVYEVDDTLKVGRIAAQAGDEVNFTQEGGLLINGHPPEKEVPYLTYPHSSGPNFPYKVPTGTYFILNDYREERLDSRYYGALPINQIKGKISTLLRVRGI

SEQ ID NO: 59 - protein, 344 aa, Streptococcus pyogenes
MKKNKLLLATAILATALGTASLNQNVKAETAGVSENAKLIVKKTFDSYTDNEVLMPKADYTFKVEADSTASGKTKDGLEIKPGIVNGLTEQIISYTNTDKPDSKVKSTEFDFSKVVFPGIGVYRYTVSEKQGDVEGITYDTKKWTVDVYVGNKEGGGFEPKFIVSKEQGTDVKKPVNFNNSFATTSLKVKKNVSGNTGELQKEFDFTLTLNESTNFKKDQIVSLQKGNEKFEVKIGTPYKFKLKNGESIQLDKLPVGITYKVNEMEANKDGYKTTASLKEGDGQSKMYQLDMEQKTDESADEIVVTNKRDTQVPTGVVGTLAPFAVLSIVAIGGVIYITKRKKA

SEQ ID NO: 60 - protein, 239 aa, Streptococcus pyogenes
MTIVQVINKAIDTLILIFCLVVLFLAGFGLWDSYHLYQQADASNFKKFKTAQQQPKFEDLLALNEDVIGWLNIPGTHIDYPLVQGKTNLEYINKAVDGSVAMSGSLFLDTRNHNDFTDDYSLIYGHHMAGNAMFGEIPKFLKKDFFSKHNKAIIETKERKKLTVTIFACLKTDAFNQLVFNPNAITNQDQQRQLVDYISKRSKQFKPVKLKHHTKFVAFSTCENFSTDNRVIVVGTIQE

SEQ ID NO: 61 - protein, 183 aa, Streptococcus pyogenes
MILTMLAFNQTVLAKDSTVQTSISVENVLERAGDSTPFSIALESIDAMKTIEEITIAGSGKASFSPLTFTTVGQYTYRVYQKPSQNKDYQADTTVFDVLVYVTYDEDGTLVAKVISRRAGDEEKSAITFKPKWLVKPIPPRQPNIPKTPLPLAGEVKSLLGILSIVLLGLLVLLYVKKLKSRL

SEQ ID NO: 62 - protein, 401 aa, Streptococcus pyogenes
MVRFDLKHVQTLHSLSQLPISVMSQDKALIQVYGNDDYLLCYYQFLKHLAIPQAAQDVIFYEGLFEESFMIFPLCHYIIAIGPFYPYSLNKDYQEQLANNCLKHSSHRSKEELLSYMALVPHFPINNVRNLLIAIDAFFDTQFETTCQQTIHQLLQHSKQMTADPDIIHRLKHISKASSQLPPVLEHLNHIMDLVKLGNPQLLKQEINRIPLSSITSSSISALRAEKNLTVIYLTRLLEFSFVENTDVAKHYSLVKYYMALNEEASDLLKVLRIRCAAIIHFSESLTNKSISDKRQMYNSVLHYVDSHLYSKLKVSDIAKRLYVSESHLRSVFKKYSNVSLQHYILSTKIKEAQLLLKRGIPVGEVAKSLYFYDTTHFHKIFKKYTGISSKDYLAKYRDNI

SEQ ID NO: 63 - protein, 656 aa, Streptococcus pyogenes
MSSSDEETLKQYASKYTSNRRGDTSGNLKKQIAKVLTEGYPTNKSDWLNGLTENEKIEVTQDAIWYFTETTVPADRSYTNRNVNSQKMKEVYQKLIDTTDIDKYEDVQFDLFVPQDTNLQAVISVEPVIESLPWTSLKPIAQKDITAKKIWVDAPKEKPIIYFKLYRQLPGEKEVAVDDAELKQINSEGQQEISVTWTNQLVTDEKGMAYIYSVKEVDKNGELLEPKDYIKKEDGLTVTNTYVKPTSGHYDIEVTFGNGHIDITEDTTPDIVSGENQMKQIEGEDSKPIDEVTENNLIEFGKNTMPGEEDGTNSNKYEEVEDSRPVDTLSGLSSEQGQSGDMTIEEDSATHIKFSKRDIDGKELAGATMELRDSSGKTISTWISDGQVKDFYLMPGKYTFVETAAPDGYEVATAITFTVNEQGQVTVNGKATKGDAHIVMVDAYKPTKGSGQVIDIEEKLPDEQGHSGSTTEIEDSKSSDVIIGGQGEVVDTTEDTQSGMTGHSGSTTEIEDSKSSDVIIGGQGEVVDTTEDTQSGMTGHSGSTTKIEDSKSSDVIVGGQGQIVETTEDTQTGMHGDSGRKTEVEDTKLVQSFHFDNKEPESNSEIPKKDKSKSNTSLPATGEKQHNKFFWMVTSCSLISSVFVISLKSKKRLSSC

SEQ ID NO: 64 - protein, 511 aa, Streptococcus pyogenes; identical to SEQ ID NO: 56

SEQ ID NO: 65 - protein, 744 aa, Streptococcus pyogenes; identical to SEQ ID NO: 57

SEQ ID NO: 66 - protein, 173 aa, Streptococcus pyogenes; identical to SEQ ID NO: 58

SEQ ID NO: 67 - protein, 349 aa, Streptococcus pyogenes
MEREKMKKNKLLLATAILATALGTASLNQNVKAETAGVSENAKLIVKKTFDSYTDNEVLMPKADYTFKVEADSTASGKTKDGLEIKPGIVNGLTEQIISYTNTDKPDSKVKSTEFDFSKVVFPGIGVYRYTVSEKQGDVEGITYDTKKWTVDVYVGNKEGGGFEPKFIVSKEQGTDVKKPVNFNNSFATTSLKVKKNVSGNTGELQKEFDFTLTLNESTNFKKDQIVSLQKGNEKFEVKIGTPYKFKLKNGESIQLDKLPVGITYKVNEMEANKDGYKTTASLKEGDGQSKMYQLDMEQKTDESADEIVVTNKRDTQVPTGVVGTLAPFAVLSIVAIGGVIYITKRKKA

SEQ ID NO: 68 - protein, 241 aa, Streptococcus pyogenes
MVMTIVQVINKAIDTLILIFCLVVLFLAGFGLWDSYHLYQQADASNFKKFKTAQQQPKFEDLLALNEDVIGWLNIPGTHIDYPLVQGKTNLEYINKAVDGSVAMSGSLFLDTRNHNDFTDDYSLIYGHHMAGNAMFGEIPKFLKKDFFSKHNKAIIETKERKKLTVTIFACLKTDAFNQLVFNPNAITNQDQQRQLVDYISKRSKQFKPVKLKHHTKFVAFSTCENFSTDNRVIVVGTIQE

SEQ ID NO: 69 - protein, 189 aa, Streptococcus pyogenes
MLFSVVMILTMLAFNQTVLAKDSTVQTSISVENVLERAGDSTPFSIALESIDAMKTIEEITIAGSGKASFSPLTFTTVGQYTYRVYQKPSQNKDYQADTTVFDVLVYVTYDEDGTLVAKVISRRAGDEEKSAITFKPKWLVKPIPPRQPNIPKTPLPLAGEVKSLLGILSIVLLGLLVLLYVKKLKSRL

SEQ ID NO: 70 - protein, 285 aa, Streptococcus pyogenes
MALVPHFPINNVRNLLIAIDAFFDTQFETTCQQTIHQLLQHSKQMTADPDIIHRLKHISKASSQLPPVLEHLNHIMDLVKLGNPQLLKQEINRIPLSSITSSSISALRAEKNLTVIYLTRLLEFSFVENTDVAKHYSLVKYYMALNEEASDLLKVLRIRCAAIIHFSESLTNKSISDKRQMYNSVLHYVDSHLYSKLKVSDIAKRLYVSESHLRSVFKKYSNVSLQHYILSTKIKEAQLLLKRGIPVGEVAKSLYFYDTTHFHKIFKKYTGISSKDYLAKYRDNI

SEQ ID NO: 71 - protein, 733 aa, Streptococcus pyogenes
MTQKNSYKLSFLLSLTGFILGLLLVFIGLSGVSVGHAETRNGANKQGAFEIKKNKSQEEYNYEVYDNRNILQDGEHKLEIKRVDGTGKTYQGFCFQLTKNFPTAQGVSKKLYKKLSSSDEETLKQYASKYTSNRRGDTSGNLKKQIAKVLTEGYPTNKSDWLNGLTENEKIEVTQDAIWYFTETTVPADRSYTNRNVNSQKMKEVYQKLIDTTDIDKYEDVQFDLFVPQDTNLQAVISVEPVIESLPWTSLKPIAQKDITAKKIWVDAPKEKPIIYFKLYRQLPGEKEVAVDDAELKQINSEGQQEISVTWTNQLVTDEKGMAYIYSVKEVDKNGELLEPKDYIKKEDGLTVTNTYVKPTSGHYDIEVTFGNGHIDITEDTTPDIVSGENQMKQIEGEDSKPIDEVTENNLIEFGKNTMPGEEDGTNSNKYEEVEDSRPVDTLSGLSSEQGQSGDMTIEEDSATHIKFSKRDIDGKELAGATMELRDSSGKTISTWISDGQVKDFYLMPGKYTFVETAAPDGYEVATAITFTVNEQGQVTVNGKATKGDAHIVMVDAYKPTKGSGQVIDIEEKLPDEQGHSGSTTEIEDSKSSDVIIGGQGEVVDTTEDTQSGMTGHSGSTTKIEDSKSSDVIVGGQGQIVETTEDTQTGMHGDSGRKTEVEDTKLVQSFHFDNKEPESNSEIPKKDKSKSNTSLPATGEKQHNKFFWMVTSCSLISSVFVISLKSKKRLSSC

SEQ ID NO: 72 - protein, 217 aa, Streptococcus pyogenes
MPYVKKKKDSFLVETYLEQSIRDKSELVLLLFKSPTIIFSHVAKQTGLTAVQLKYYCKELDDFFGNNLDITIKKGKIICCFVKPVKEFYLHQLYDTSTILKLLVFFIKNGTTSQPLIKFSKKYFLSSSSAYRLRESLIKLLREFGLRVSKNTIVGEEYRIRYLIAMLYSKFGIVIYPLDHLDNQIIYRFLSQSATNLRTSPWLEEPFSFYNMLLALS

SEQ ID NO: 73 - protein, 524 aa, Streptococcus pyogenes
MQKRDKTNYGSANNKRRQTTIGLLKVFLTFVALIGIVGFSIRAFGAEEQSTETKKTSVIIRKYAEGDYSKLLEGATLKLAQIEGSGFQEQSFESSTSGQKLQLSDGTYILTETKSPQGYEIAEPITFKVTAGKVFIKGKDGQFVENQNKEVAEPYSVTAYNDFDDSGFINPKTFTPYGKFYYAKNANGTSQVVYCFNVDLHSPPDSLDKGETIDPDFNEGKEIKYTHILGADLFSYANNPRASTNDELLSQVKKVLEKGYRDDSTTYANLTSVEFRAATQLAIYYFTDSVDLDNLADYHGFGALTTEALNATKEIVAYAEDRANLPNISNLDFYVPNSNKYQSLIGTQYHPESLVDIIRMEDKQAPIIPITHKLTISKTVTGTIADKKKEFNFEIHLKSSDGQAISGTYPTNSGELTVTDGKATFTLKDGESLIVEGLPSGYSYEITETGASDYEVSVNGKNAPDGKATKASVKEDETITFENRKDLVPPTGLTTDGAIYLWLLLLVLLGLWVWLIGRKGLKND

SEQ ID NO: 74 - protein, 173 aa, Streptococcus pyogenes
MTNYLNRLNENPLFKAFIRLVLKISIIGFLGYILFQYIFGVMIINTNVMSPALSAGDGILYYRLTDRYHINDVVVYEVDNTLKVGRIVAQAGDEVSFTQEGGLLINGHPPEKEVPYLTYPHSSGPNFPYKVPTGTYFILNDYREERLDSRYYGALPINQIKGKISTLLRVRGI

SEQ ID NO: 75 - protein, 344 aa, Streptococcus pyogenes
MKKNKLLLATAILATALGTASLNQNVKAETAGVIDGSTLVVKKTFPSYTDDKVLMPKADYTFKVEADDNAKGKTKDGLDIKPGVIDGLENTKTIHYGNSDKTTAKEKSVNFDFANVKFPGVGVYRYTVSEVNGNKAGIAYDSQQWTVDVYVVNREDGGFEAKYIVSTEGGQSDKKPVLFKNFFDTTSLKVTKKVTGNTGEHQRSFSFTLLLTPNECFEKGQVVNILQGGETKKVVIGEEYSFTLKDKESVTLSQLPVGIEYKVTEEDVTKDGYKTSATLKDGDVTDGYNLGDSKTTDKSTDEIVVTNKRDTQVPTGVVGTLAPFAVLSIVAIGGVIYITKRKKA

SEQ ID NO: 76 - protein, 246 aa, Streptococcus pyogenes
MISQRMMMTIVQVINKAIDTLILIFCLVVLFLAGFGLWDSYHLYQQADASNFKKFKTAQQQPKFEDLLALNEDVIGWLNIPGTHMDYPLVQGKTNLEYINKAVDGSVAMSGSLFLDTRNHNDFTDDYSLIYGHHMAGNAMFGEIPKFLKKDFFNKHNKAIIETKERKKLTVTIFACLKTDAFDQLVFNPNAITNQDQQRQLVDYISKRSKQFKPVKLKHHTKFVAFSTCENFSTDNRVIVVGTIQE

SEQ ID NO: 77 - protein, 195 aa, Streptococcus pyogenes
MRKYWKMLFSVVMILTMLAFNQTVLAKDSTVQTSISVENVLERAGDSTSFSVALESIDAMKTIDEITIAGSGKASFSPLTFTTVGQYTYRVYQKPSQNKDYQADTTVFDVLVYVTYDEDGTLVAKVISRRAGDEEKSAITFKPKRLVKPIPPRQPDIPKTPLPLAGEVKSLLGILSIVLLGLLVLLYVKKLKSRL

SEQ ID NO: 78 - protein, 401 aa, Streptococcus pyogenes
MAIFDLKHVQTLHSLSQLPISVMSQDKALIQVYGNDDYLLCYYQFLKHLAIPQAAQDVIFYEGLFEESFMIFPLCHYIIAIGPFYPYSLNKDYQEQLANNCLKHSSHRSKEELLSYMALVPHFPINNVRNLLIAIDAFFDTQFETTCQQTIHQLLQHSKQMTADPDIIHRLKHISKASSQLPPVLEHLNHIMDLVKLGNPQLLKQEINRIPLSSITSSSISALRAEKNLTVIYLTRLLEFSFVENTDVAKHYSLVKYYMALNEEASDLLKVLRIRCAAIIHFSESLTNKSISDKRQMYNSVLHYVDSHLYSKLKVSDIAKRLYVSESHLRSVFKKYSNVSLQHYILSTKIKEAQLLLKRGIPVGEVAKSLYFYDTTHFHKIFKKYTGISSKDYLAKYRDNI

SEQ ID NO: 79 - protein, 696 aa, Streptococcus pyogenes
MTQKNSYKLSFLLSLTGFILGLLLVFIGLSGVSVGHAETRNGANKQGAFEIKKNKSQEEYNYEVYDNRNILQDGEHKLEIKRVDGTGKTYQGFCFQLTKNFPTAQGVSKKLYKKLSSSDEETLKQYASKYTSNRRGDTSGNLKKQIAKVLTEGYPTNKSDWLNGLTENEKIEVTQDAIWYFTETTVPADRSYTNRNVNSQKMKEVYQKLIDTTDIDKYEDVQFDLFVPQDTNLQAVISVEPVIESLPWTSLKPIAQKDITAKKIWVDAPKEKPIIYFKLYRQLPGEKEVAVDDAELKQINSEGQQEISVTWTNQLVTDEKGMAYIYSVKEVDKNGELLEPKDYIKKEDGLTVTNTYVKPTSGHYDIEVTFGNGHIDITEDTTPDIVSGENQMKQIEGEDSKPIDEVTENNLIEFGKNTMPGEEDGTNSNKYEEVEDSRPVDTLSGLSSEQGQSGDMTIEEDSATHIKFSKRDIDGKELAGATMELRDSSGKTISTWISDGQVKDFYLMPGKYTFVETAAPDGYEIATAITFTVNEQGQVTVNGKATKGDAHIVMVDAYKPTKGSGQVIDIEEKLPDEQGHSGSTTEIEDSKSSDVIIGGQGQIVETTEDTQTGMHGDSGCKTEVEDTKLVQSFHFDNKESESNSEIPKKDKPKSNTSLPATGEKQHNMFFWMVTSCSLISSVFVISLKTKKRLSSC

SEQ ID NO: 80 - protein, 283 aa, Streptococcus pneumoniae
MSRTKLRALLGYLLMLVACLIPIYCFGQMVLQSLGQVKGHATFVKSMTTEMYQEQQNHSLAYNQRLASQNRIVDPFLAEGYEVNYQVSDDPDAVYGYLSIPSLEIMEPVYLGADYHHLGMGLAHVDGTPLPLDGTGIRSVIAGHRAEPSHVFFRHLDQLKVGDALYYDNGQEIVEYQMMDTEIILPSEWEKLESVSSKNIMTLITCDPIPTFNKRLLVNFERVAVYQKSDPQTAAVARVAFTKEGQSVSRVATSQWLYRGLVVLAFLGILFVLWKLARLLRGK

SEQ ID NO: 81 - protein, 261 aa, Streptococcus pneumoniae
MSRYYYRIESNEVIKEFDETVSQMDKAELEERWRLAQAFNATLKPSEILDPFTEQEKKKGVSEYANMLKVHERIGYVEIPAIDQEIPMYVGTSEDILQKGAGLLEGASLPVGGENTHTVITAHRGLPTAELFSQLDKMKKGDIFYLHVLDQVLAYQVDQIVTVEPNDFEPVLIQHGEDYATLLTCTPYMINSHRLLVRGKRIPYTAPIAERNRAVRERGQFWLWLLLGAMAVILLLLYRVYRNRRIVKGLEKQLEGRHVKD

SEQ ID NO: 82 - protein, 279 aa, Streptococcus pneumoniae
MAVMAYPLVSRLYYRVESNQQIADFDKEKATLDEADIDERMKLAQAFNDSLNNVVSGDPWSEEMKKKGRAEYARMLEIHERMGHVEIPVIDVDLPVYAGTAEEVLQQGAGHLEGTSLPIGGNSTHAVITAHTGLPTAKMFTDLTKLKVGDKFYVHNIKEVMAYQVDQVKVIEPTNFDDLLIVPGHDYVTLLTCTPYMINTHRLLVRGHRIPYVAEVEEEFIAANKLSHLYRYLFYVAVGLIVILLWIIRRLRKKKKQPEKALKALKAARKEVKVEDGQQ

SEQ ID NO: 83 - protein, 43 aa, Streptococcus pneumoniae
MFLPFLSASLYLQTHHFIAFPNRQSYLLRETRKSHFFLIHHPF

SEQ ID NO: 84 - protein, 393 aa, Streptococcus pneumoniae
MISRIFFVMALCFSLVWGAHAVQAQEDHTLVLQLENYQEVVSQLPSRDGHRLQVWKLDDSYSYDDRVQIVRDLHSWDENKLSSFKKTSFEMTFLENQIEVSHIPNGLYYVRSIIQTDAVSYPAEFLFEMTDQTVEPLVIVAKKTDTMTTKVKLIKVDQDHNRLEGVGFKLVSVARDVSEKEVPLIGEYRYSSSGQVGRTLYTDKNGEIFVTNLPLGNYRFKEVEPLAGYAVTTLDTDVQLVDHQLVTITVVNQKLPRGNVDFMKVDGRTNTSLQGAMFKVMKEESGHYTPVLQNGKEVVVTSGKDGRFRVEGLEYGTYYLWELQAPTGYVQLTSPVSFTIGKDTRKELVTVVKNNKRPRIDVPDTGEETLYILMLVAILLFGSGYYLTKKPNN

SEQ ID NO: 85 - protein, 665 aa, Streptococcus pneumoniae
MKSINKFLTMLAALLLTASSLFSAATVFAAGTTTTSVTVHKLLATDGDMDKIANELETGNYAGNKVGVLPANAKEIAGVMFVWTNTNNEIIDENGQTLGVNIDPQTFKLSGAMPATAMKKLTEAEGAKFNTANLPAAKYKIYEIHSLSTYVGEDGATLTGSKAVPIEIELPLNDVVDAHVYPKNTEAKPKIDKDFKGKANPDTPRVDKDTPVNHQVGDVVEYEIVTKIPALANYATANWSDRMTEGLAFNKGTVKVTVDDVALEAGDYALTEVATGFDLKLTDAGLAKVNDQNAEKTVKITYSATLNDKAIVEVPESNDVTFNYGNNPDHGNTPKPNKPNENGDLTLTKTWVDATGAPIPAGAEATFDLVNAQTGKVVQTVTLTTDKNTVTVNGLDKNTEYKFVERSIKGYSADYQEITTAGEIAVKNWKDENPKPLDPTEPKVVTYGKKFVKVNDKDNRLAGAEFVIANADNAGQYLARKADKVSQEEKQLVVTTKDALDRAVAAYNALTAQQQTQQEKEKVDKAQAAYNAAVIAANNAFEWVADKDNENVVKLVSDAQGRFEITGLLAGTYYLEETKQPAGYALLTSRQKFEVTATSYSATGQGIEYTAGSGKDDATKVVNKKITIPQTGGIGTIIFAVAGAAIMGIAVYAYVKNNKDEDQLA

SEQ ID NO: 86 - protein, 893 aa, Streptococcus pneumoniae
MLNRETHMKKVRKIFQKAVAGLCCISQLTAFSSIVALAETPETSPAIGKVVIKETGEGGALLGDAVFELKNNTDGTTVSQRTEAQTGEAIFSNIKPGTYTLTEAQPPVGYKPSTKQWTVEVEKNGRTTVQGEQVENREEALSDQYPQTGTYPDVQTPYQIIKVDGSEKNGQHKALNPNPYERVIPEGTLSKRIYQVNNLDDNQYGIELTVSGKTVYEQKDKSVPLDVVILLDNSNSMSNIRNKNARRAERAGEATRSLIDKITSDSENRVALVTYASTIFDGTEFTVEKGVADKNGKRLNDSLFWNYDQTSFTTNTKDYSYLKLTNDKNDIVELKNKVPTEAEDHDGNRLMYQFGATFTQKALMKADEILTQQARQNSQKVIFHITDGVPTMSYPINFNHATFAPSYQNQLNAFFSKSPNKDGILLSDFITQATSGEHTIVRGDGQSYQMFTDKTVYEKGAPAAFPVKPEKYSEMKAAGYAVIGDPINGGYIWLNWRESILAYPFNSNTAKITNHGDPTRWYYNGNIAPDGYDVFTVGIGINGDPGTDEATATSFMQSISSKPENYTNVTDTTKILEQLNRYFHTIVTEKKSIENGTITDPMGELIDLQLGTDGRFDPADYTLTANDGSRLENGQAVGGPQNDGGLLKNAKVLYDTTEKRIRVTGLYLGTDEKVTLTYNVRLNDEFVSNKFYDTNGRTTLHPKEVEQNTVRDFPIPKIRDVRKYPEITISKEKKLGDIEFIKVNKNDKKPLRGAVFSLQKQHPDYPDIYGAIDQNGTYQNVRTGEDGKLTFKNLSDGKYRLFENSEPAGYKPVQNKPIVAFQIVNGEVRDVTSIVPQDIPAGYEFTNDKHYITNEPIPPKREYPRTGGIGMLPFYLIGCMMMGGVLLYTRKHP

SEQ ID NO: 87 - protein, 509 aa, Streptococcus pneumoniae
MLNKYIEKRITDKITILNILLDIRSIELDELSTLTSLQSKSLLSILQELQETFEEELTFNLDTQQVQLIEHHSHQTNYYFHQLYNQSTILKILRFFLLQGNQSFNEFTQKEYISIATGYRVRQKCGLLLRSVGLDLVKNQVVGPEYRIRFLIALLQFHFGIEIYDLNDGSMDWVTHMIVQSNSQLSHELLEITPDEYVHFSILVALTWKRREFPLEFPESKEFEKLKNLFMYPILMEHCQTYLEPHANMTFTQEELDYIFLVYCSANSSFSKDKWNQEKKTHTIQLILQHTRGKHLLSKFKNILGNDISNSLSFLTALTFLTRTFLFGLQNLVPYYNYYEHYGIESDKPLYHISKAIVQEWMTEQKIEGVIDQHRLYLFSLYLTETIFSSLPAIPIFIILNNQADVNLIKSIILRNFTDKVASVTGYNILISPPPSEEHLTEPLIIITTKEYLPYVKKQYPKGKHHFLTIALDLHVSQQRLIYQTIVDIRKEAFDKRVAMIAKKAHYLL

SEQ ID NO: 88 - DNA, 1533 bp, Streptococcus pyogenes
atgccttatgtcaaaaagaaaaaggatagtttcttagtagaaacatatcttgaacagtctattagagataaaagtgaattagtcttactgttatttaaatcgcctactatcattttttctcatgttgctaaacaaactggtctgacggctgtacaattaaaatattactgtaaagaacttgatgacttttttggaaataatttagacattaccattaaaaagggcaaaataatatgttgttttgtcaaacctgttaaggaattctaccttcatcaactctatgacacatcaacaatattaaaattattagttttctttattaaaaatggaacgtcatcacaacctctgattaaattttcaaaaaagtattttctatcaagctcctcagcttatcgactacgggaatcgctgatcaaattactacgggaatttggcttgagagtctcaaaaaatacaattgtcggagaggaatatcgtattcgctatcttattgccatgctatatagtaaatttggcattgtcatctatccgttagatcatctagacaatcaaattatttatcgcttcttatcacaaagtgcaaccaatttaagaacatcgccctggctagaggaacctttttctttttataatatgttacttgccttgtcatggaaacgtcaccaatttgcagttagcattcctcaaacacgtatttttcgacaattaaaaaagctttttatctatgattgtttaactcgaagcagtcgacaagtaatcgaaaatgctttttcgttaatgttctcacaaggagatctcgattatctttttttaatttatattaccaccaataattcctttgccagcctacaatggactccacagcatattgaaacttgctgccatatttttgaaaaaaatgacacatttcggttattgttagagcccattcttaaacgtttaccgcaattaaaccattctaaacaagaccttattaaagcccttatgtatttttcaaaatcttttctatttaacctccaacatttcgtcatcgagattccttctttttccttgccgacctatacaggcaactctaatctttacaaagctttaaaaaatattgtaaatcagtggcttgctcaattacccggaaagcgtcatcttaacgaaaagcatctccaacttttttgctctcatattgaacaaatcttaaaaaataaacaacctgctttaactgtcgttttaatatctagtaactttataaatgctaaactccttacagatactatcccacgatatttttctgataaaggaattcatttttattctttttacttattaagagatgatatctatcaaattccaagcttaaaaccagatttagttatcactcatagccgattaattccttttgttaagaatgatctggtcaaaggtgttactgttgctgaattttcttttgataaccctgactactctattgcttcaattcaaaacttgatatatcagctcaaagataaaaaatatcaagattttctaaacgagcaattacaa

SEQ ID NO: 89 - protein, 511 aa, Streptococcus pyogenes
MPYVKKKKDSFLVETYLEQSIRDKSELVLLLFKSPTIIFSHVAKQTGLTAVQLKYYCKELDDFFGNNLDITIKKGKIICCFVKPVKEFYLHQLYDTSTILKLLVFFIKNGTSSQPLIKFSKKYFLSSSSAYRLRESLIKLLREFGLRVSKNTIVGEEYRIRYLIAMLYSKFGIVIYPLDHLDNQIIYRFLSQSATNLRTSPWLEEPFSFYNMLLALSWKRHQFAVSIPQTRIFRQLKKLFIYDCLTRSSRQVIENAFSLMFSQGDLDYLFLIYITTNNSFASLQWTPQHIETCCHIFEKNDTFRLLLEPILKRLPQLNHSKQDLIKALMYFSKSFLFNLQHFVIEIPSFSLPTYTGNSNLYKALKNIVNQWLAQLPGKRHLNEKHLQLFCSHIEQILKNKQPALTVVLISSNFINAKLLTDTIPRYFSDKGIHFYSFYLLRDDIYQIPSLKPDLVITHSRLIPFVKNDLVKGVTVAEFSFDNPDYSIASIQNLIYQLKDKKYQDFLNEQLQ

SEQ ID NO: 90 - DNA, 1569 bp, Streptococcus pyogenes
ttgcaaaagagggataaaaccaattatggaagcgctaacaacaaacgacgacaaacgacgatcggattactgaaagtatttttgacgtttgtagctctgataggaatagtagggttttctatcagagcgttcggagctgaagaaaaatctactgaaactaaaaaaacgtcagtcattattagaaaatatgctgaaggtgactactctaaacttctagagggagcaactttgcgtttaacaggggaagatatcccagattttcaagaaaaagtcttccaaagtaatggaacaggagaaaagattgaattatcaaatgggacttataccttaacagaaacatcatctccagatggatataaaattacggagccgattaagtttagagtagtgaataaaaaagtatttatcgtccaaaaagatggttctcaagtggaaaacccaaacaaagaactaggttctccatatactatagaggcatacaatgattttgatgaatttggcttactgtcaacacaaaattatgcgaaattttattatggaaaaaactatgatggcagttcacaaattgtttattgcttcaatgccaacttgaaatctccacctgactcggaagatcatggtgctacaataaatcctgactttacgactggtgatattaggtacagtcatattgctggttcagatttgataaaatacgctaatacagctagggatgaagatcctcaattatttttaaaacacgtaaaaaaagtaattgaaaatgggtatcataaaaaaggtcaagctattccatataacggtctgactgaggcacagtttcgtgcggctactcaactggcaatttattattttacagatagtgttgacttaactaaggatagattgaaagacttccatggatttggagatatgaatgatcaaactttgggtgtagctaaaaaaattgtagaatacgctttgagtgatgaagattcaaaactaacaaatcttgatttcttcgtacctaataatagcaaataccaatctcttattgggacagaataccatccagatgatttggttgacgtgattcgtatggaagataaaaagcaagaagttattccagtaactcatagtttgacggtgcaaaaaacagtagtcggtgagttgggagataagactaaaggctttcaatttgaacttgagttgaaagataaaactggacagcctattgttaacactctaaaaactaataatcaagatttagtagctaaagatgggaaatattcatttaatctaaagcatggtgacaccataagaatagaaggattaccgacgggatattcttataccctgaaagagactgaagctaaggattatatagtaactgttgataacaaagttagtcaagaagctcaatcagcaagtgagaatgtcacagcagacaaagaagtcacttttgaaaaccgaaaagatcttgtcccaccaactggtttgacaacagatggggctatctatctttggttattactacttgttccatttgggttattggtttggctatttggtcgtaaagggttaaaaaatgac

SEQ ID NO: 91 - protein, 523 aa, Streptococcus pyogenes
MQKRDKTNYGSANNKRRQTTIGLLKVFLTFVALIGIVGFSIRAFGAEEKSTETKKTSVIIRKYAEGDYSKLLEGATLRLTGEDIPDFQEKVFQSNGTGEKIELSNGTYTLTETSSPDGYKITEPIKFRVVNKKVFIVQKDGSQVENPNKELGSPYTIEAYNDFDEFGLLSTQNYAKFYYGKNYDGSSQIVYCFNANLKSPPDSEDHGATINPDFTTGDIRYSHIAGSDLIKYANTARDEDPQLFLKHVKKVIENGYHKKGQAIPYNGLTEAQFRAATQLAIYYFTDSVDLTKDRLKDFHGFGDMNDQTLGVAKKIVEYALSDEDSKLTNLDFFVPNNSKYQSLIGTEYHPDDLVDVIRMEDKKQEVIPVTHSLTVQKTVVGELGDKTKGFQFELELKDKTGQPIVNTLKTNNQDLVAKDGKYSFNLKHGDTIRIEGLPTGYSYTLKETEAKDYIVTVDNKVSQEAQSASENVTADKEVTFENRKDLVPPTGLTTDGAIYLWLLLLVPFGLLVWLFGRKGLKND

SEQ ID NO: 92 - DNA, 519 bp, Streptococcus pyogenes
atgactaattacctaaatcgtttaaatgagaattcactatttaaagctttcatacggttagtacttaagatttctattattgggtttctaggttacattctatttcagtatgtttttggtgttatgattattaacactaatgatatgagtcctgctttaagtgcaggtgacggtgttttatattatcgtttgactgatcgctatcatattaatgatgtggtggtctatgaggttgataacactttgaaagttggtcgaattgtcgctcaagctggcgatgaggttagttttacgcaagaaggaggactgttgattaatgggcatccaccagaaaaagaggtcccttacctgacgtatcctcactcaagtggcccaaactttccctataaagttcctacgggtaagtatttcatattgaatgattatcgtgaagaacgtttggacagtcgttattatggggcgttacccgtcaatcaaataaaagggaaaatctcaactctattaagagtgagaggaatt

SEQ ID NO: 93 - protein, 173 aa, Streptococcus pyogenes
MTNYLNRLNENSLFKAFIRLVLKISIIGFLGYILFQYVFGVMIINTNDMSPALSAGDGVLYYRLTDRYHINDVVVYEVDNTLKVGRIVAQAGDEVSFTQEGGLLINGHPPEKEVPYLTYPHSSGPNFPYKVPTGKYFILNDYREERLDSRYYGALPVNQIKGKISTLLRVRGI

SEQ ID NO: 94 - DNA, 1056 bp, Streptococcus pyogenes
ttggagagagaaaaaatgaaaaaaaacaaattattacttgctactgcaatcttagcaactgctttaggaacagcttctttaaatcaaaacgtaaaagctgagacggcaggggttgtaacaggaaaatcactacaagttacaaagacaatgacttatgatgatgaagaggtgttaatgcccgaaaccgcctttacttttactatagagcctgatatgactgcaagtggaaaagaaggcagcctagatattaaaaatggaattgtagaaggcttagacaaacaagtaacagtaaaatataagaatacagataaaacatctcaaaaaactaaaatagcacaatttgatttttctaaggttaaatttccagctataggtgtttaccgctatatggtttcagagaaaaacgataaaaaagacggaattacgtacgatgataaaaagtggactgtagatgtttatgttgggaataaggccaataacgaagaaggtttcgaagttctatatattgtatcaaaagaaggtacttctagtactaaaaaaccaattgaatttacaaactctattaaaactacttccttaaaaattgaaaaacaaataactggcaatgcaggagatcgtaaaaaatcattcaacttcacattaacattacaaccaagtgaatattataaaactggatcagttgtgaaaatcgaacaggatggaagtaaaaaagatgtgacgataggaacgccttacaaatttactttgggacacggtaagagtgtcatgttatcgaaattaccaattggtatcaattactatcttagtgaagacgaagcgaataaagacggctacactacaacggcaacattaaaagaacaaggcaaagaaaagagttccgatttcactttgagtactcaaaaccagaaaacagacgaatctgctgacgaaatcgttgtcacaaataagcgtgacactcaagttccaactggtgttgtagggacccttgctccatttgcagttcttagcattgtggctattggtggagttatctatattacaaaacgtaaaaaagct

SEQ ID NO: 95 - protein, 352 aa, Streptococcus pyogenes
MEREKMKKNKLLLATAILATALGTASLNQNVKAETAGVVTGKSLQVTKTMTYDDEEVLMPETAFTFTIEPDMTASGKEGSLDIKNGIVEGLDKQVTVKYKNTDKTSQKTKIAQFDFSKVKFPAIGVYRYMVSEKNDKKDGITYDDKKWTVDVYVGNKANNEEGFEVLYIVSKEGTSSTKKPIEFTNSIKTTSLKIEKQITGNAGDRKKSFNFTLTLQPSEYYKTGSVVKIEQDGSKKDVTIGTPYKFTLGHGKSVMLSKLPIGINYYLSEDEANKDGYTTTATLKEQGKEKSSDFTLSTQNQKTDESADEIVVTNKRDTQVPTGVVGTLAPFAVLSIVAIGGVIYITKRKKA

SEQ ID NO: 96 - DNA, 738 bp, Streptococcus pyogenes
gtgattagtcaaagaatgatgatgacaattgtacaggttatcaataaagccattgatactctcattcttatcttttgtttagtcgtactatttttagctggttttggtttgtgggattcttatcatctctatcaacaagcagacgcttctaatttcaaaaaatttaaaacagctcaacaacagcctaaatttgaagacttgttagctttgaatgaggatgtcattggttggttaaatatcccagggactcatattgattatcctctagttcagggaaaaacgaatttagagtatattaataaagcagttgatggcagtgttgccatgtctggtagtttatttttagatacacggaatcataatgattttacggacgattactctctgatttatggccatcatatggcaggtaatgccatgtttggcgaaattccaaaatttttaaaaaaggattttttcaacaaacataataaagctatcattgaaacaaaagagagaaaaaaactaaccgtcactatttttgcttgtctcaagacagatgcctttgaccagttagtttttaatcctaatgctattaccaatcaagaccaacaaaagcagctcgttgattatatcagtaaaagatcaaaacaatttaaacctgttaaattgaagcatcatacaaagttcgttgctttttcaacgtgtgaaaatttttctactgacaatcgtgttatcgttgtcggtactattcaagaa

SEQ ID NO: 97 - protein, 246 aa, Streptococcus pyogenes
MISQRMMMTIVQVINKAIDTLILIFCLVVLFLAGFGLWDSYHLYQQADASNFKKFKTAQQQPKFEDLLALNEDVIGWLNIPGTHIDYPLVQGKTNLEYINKAVDGSVAMSGSLFLDTRNHNDFTDDYSLIYGHHMAGNAMFGEIPKFLKKDFFNKHNKAIIETKERKKLTVTIFACLKTDAFDQLVFNPNAITNQDQQKQLVDYISKRSKQFKPVKLKHHTKFVAFSTCENFSTDNRVIVVGTIQE

SEQ ID NO: 98 - DNA, 672 bp, Streptococcus pyogenes
ttgctttttcaacgtgtgaaaatttttctactgacaatcgtgttatcgttgtcggtactattcaagaataacgaaaggaggagacttttgagaaaatattggaaaatgttattttctgtcgtaatgatattaaccatgctggcctttaatcagactgttttagcaaaagacagcactgttcaaactagcattagtgtcgaaaatgtcttagagagagcaggcgatagtaccccattttcggttgcattagaatcaattgatgcgatgaaaacaatagacgaaataacaattgctggttctggaaaagcaagcttttcccctctgaccttcacaacagttgggcaatatacttatcgtgtttatcagaagccttcacaaaataaagattatcaagcagatactactgtatttgacgttcttgtctatgtgacctatgatgaagatgggactctagtcgcaaaagttatttctcgaagggctggagacgaagaaaaatcagcgattacttttaagcccaaacggttagtaaaaccaataccgcctagacaacctaacatccctaaaaccccattaccattagctggtgaagtaaaaagtttattgggtatcttaagtatcgtattactggggttactagttcttctttatgttaaaaaactgaagagtaggcta

SEQ ID NO: 99 - protein, 224 aa, Streptococcus pyogenes
MLFQRVKIFLLTIVLSLSVLFKNNERRRLLRKYWKMLFSVVMILTMLAFNQTVLAKDSTVQTSISVENVLERAGDSTPFSVALESIDAMKTIDEITIAGSGKASFSPLTFTTVGQYTYRVYQKPSQNKDYQADTTVFDVLVYVTYDEDGTLVAKVISRRAGDEEKSAITFKPKRLVKPIPPRQPNIPKTPLPLAGEVKSLLGILSIVLLGLLVLLYVKKLKSRL

SEQ ID NO: 100 - DNA, 1236 bp, Streptococcus pyogenes
atgatacaactaaggatgggggcaatctatcaaatggttatattcgatttaaaacatgtgcaaacattacacagcttgtctcaattacctatttcagtgatgtcacaagataaggcacttattcaagtatatggtaatgacgactatttattatgttactatcaatttttaaagcatctagctattcctcaagctgcacaagatgttattttttatgagggtttatttgaagagtcctttatgatttttcctctttgtcactacattattgccattggacctttctatccttattcacttaataaagactatcaggaacaattagctaataattttttaaaacattcttctcatcgtagcaaagaagagctcttgtcctatatggcacttgtcccacattttccaattaataatgtgcggaaccttttgatagctattgacgctttttttgacacacaatttgagacgacttgccaacaaacgattcatcaattgttgcagcattcaaaacagatgactgctgatcctgatatcattcatcgccttaagcatattagcaaagcatctagccaattaccgcctgttttagagcacctaaatcatattatggatctggtaaagctaggcaatccacaattgctcaagcaagaaatcaatcgcatccccttatcaagtatcacctcatcttctatttctgctctaagggcggaaaagaacctcactgttatctatttaactaggttactggaattcagttttgtagaaaatactgacgtagcaaagcattatagccttgtcaaatactacatggccttaaatgaagaagcgagtgacttgctcaaagttttgagaattcgctgtgcagctatcatccatttttccgaatcattaaccaataaaagtatttctgataaacgtcaaatgtacaatagtgtgcttcattatgtcgatagtcacctgtattccaaattaaaggtatctgatatcgctaagcgcctatatgtttccgaatctcacttacgttcagtctttaaaaaatactcaaatgtttccttacaacattatattctaagtacaaaaatcaaagaagctcaactactcttaaaacgaggaattcctgttggagaagtggctaaaagcttatatttttatgacactacccattttcataaaatctttaaaaaatacacgggtatttcttcaaaagactatcttgctaaataccgagataatatt

SEQ ID NO: 101 - protein, 412 aa, Streptococcus pyogenes
MIQLRMGAIYQMVIFDLKHVQTLHSLSQLPISVMSQDKALIQVYGNDDYLLCYYQFLKHLAIPQAAQDVIFYEGLFEESFMIFPLCHYIIAIGPFYPYSLNKDYQEQLANNFLKHSSHRSKEELLSYMALVPHFPINNVRNLLIAIDAFFDTQFETTCQQTIHQLLQHSKQMTADPDIIHRLKHISKASSQLPPVLEHLNHIMDLVKLGNPQLLKQEINRIPLSSITSSSISALRAEKNLTVIYLTRLLEFSFVENTDVAKHYSLVKYYMALNEEASDLLKVLRIRCAAIIHFSESLTNKSISDKRQMYNSVLHYVDSHLYSKLKVSDIAKRLYVSESHLRSVFKKYSNVSLQHYILSTKIKEAQLLLKRGIPVGEVAKSLYFYDTTHFHKIFKKYTGISSKDYLAKYRDNI

SEQ ID NO: 102 - DNA, 2088 bp, Streptococcus pyogenes
atgacacaaaaaaatagctataagttaagcttcctgttatccctaacaggatttattttaggtttattattggtttttataggattgtccggagtatcagtaggacatgcggaaacaagaaatggagcaaacaaacaaggagcttttgaaatcaagaaaaataaaagtcaagaagaatataattatgaagtttatgataacagaaacatacttcaggatggggaacataaacttgaaataaaaagagttgatgggacaggtaaaacttatcaaggtttttgctttcagttaacgaaaaattttcccactgctcaaggtgtaagtaaaaagctgtataaaaaattgagtagtagtgatgaagaaacactaaagcaatatgcctctaagtatacaagtaataggagaggagatactagtggtaatcttaaaaagcaaattgctaaggttctgacagaaggttacccaactaacaaaagtgattggttaaatggattgactgaaaacgaaaaaatagaagtaacccaggatgcaatttggtattttacagaaacgacagttccggctgatagaagttatacgaatcgcaacgtaaatagtcaaaaaatgaaagaagtgtatcaaaagctaattgatacaacagatatagataaatatgaagatgtacaatttgatttatttgtgccacaagatacaaacttacaggcagtaattagtgtagagcctgttatcgaaagccttccttggacatcgttgaagccaatagcccagaaggatatcactgccaaaaaaatctgggtagatgcacctaaagaaaaaccaattatttattttaagctatatagacagctgcctggagaaaaggaagtagcagtggatgacgctgagctaaaacagataaatagtgaaggtcaacaagaaatatcagtaacttggacaaatcaacttgttacagatgaaaaaggaatggcttacatttattctgtaaaagaagtagataaaaatggcgagttacttgagccaaaagattatatcaagaaggaagatggacttacagttactaatacttatgtaaagccaactagtgggcactatgatatagaagtgacatttggaaatggacatattgatattacagaagatactacaccagatattgtttcaggtgaaaaccaaatgaagcaaatagagggagaagatagtaagcctattgatgaagtaacggaaaataatttaattgaatttggtaaaaacacgatgccaggtgaagaagatggcacaaattctaataagtatgaagaagtcgaagactcacgcccagttgataccttgtcaggtttatcaagtgagcaaggtcagtccggtgatatgacaattgaagaagatagtgctacccatattaaattctcaaaacgtgatattgacggcaaagagttagctggtgcaactatggagttgcgtgattcatctggtaaaactattagtacatggatttcagatggacaagtgaaagatttctacctgatgccaggaaaatatacatttgtcgaaaccgcagcaccagacggttatgagatagcaactgctattacctttacagttaatgagcaaggtcaggttactgtaaatggcaaagcaactaaaggtgacgctcatattgtcatggttgatgcttacaagccaactaagggttcaggtcaggttattgatattgaagaaaagcttccagacgagcagggccattctggctcaactactgaaatagaagatagcaagtcttcagacgttatcattggtggtcaggggcagattgtcgagacaacagaggatacccaaactggcatgcacggggattctggttgtaaaacggaagtcgaagatactaaactagtacaatccttccactttgataacaaggaatcagaaagtaactctgagattcctaaaaaagataagccaaagagtaatactagtttaccagcaactggtgagaagcaacataatatgttcttttggatggttacttcttgctcacttattagtagtgtttttgtaatatcactaaaaactaaaaaacgcctatcatcatgt

SEQ ID NO: 103 - protein, 696 aa, Streptococcus pyogenes; identical to SEQ ID NO: 79

SEQ ID NO: 104 - DNA, 1320 bp, Streptococcus pyogenes
atgaccatccaaaaaaggatgatatcttgccaatttacacatccttctaaagaaacttatctttaccaactctatgcatcatctaatgtcttacaattactagcgtttttaataaaaaatggttcccactctcgtccccttacggattttgcaagaagtcattttttatcaaactcctcagcttatcggatgcgcgaagcattgattcctttattaagaaactttgaattaaaactctctaagaacaagattgtcggtgaggaatatcgtatccgttacctcatcgctctgctatatagtaagtttggcattaaagtttatgacttgacgcagcaagacaaaaacattattcatagctttttatcccatagttccacccaccttaaaacttctccttggttatcggaatcgttttctttctatgacattttattagctttatcgtggaagcggcatcaattttcggtaactattccccaaaccagaatttttcaacaattaaaaaaactttttgtctacgattctttgaaaaaaagtagccgtgatattatcgaaacttactgccaactaaacttttcagcaggagatttggactacctctatttaatttatatcaccgctaataattcttttgcgagcttacaatggacacctgagcatatcagacaatgttgtcaactttttgaagaaaatgatacttttcgcctgcttttaaatcctatcatcactcttttacctaacctaaaagagcaaaaggctagtttagtaaaagctcttatgtttttttcaaaatcattcttgtttaatctgcaacattttattcctgagaccaacttattcgtttctccgtactataaaggaaaccaaaaactctatacgtccttaaagttaattgtcgaagagtggatggccaaacttcctggtaagcgttacttgaaccataagcattttcatcttttttgccactatgtcgagcaaattctaagaaatatccaacctcctttagttgttgttttcgtagccagtaattttatcaatgctcatctcctaacagattctttcccaaggtatttctcggataaaagcattgattttcattcctattatctattgcaagataatgtttatcaaattcctgatttaaagccagatttggtcatcactcacagtcaactgattccttttgttcaccatgaacttacaaaaggaattgctgttgctgaaatatcttttgatgaatcgattctgtctatccaagaattgatgtatcaagttaaagaggaaaaattccaagctgatttaaccaaacaattaacataa

SEQ ID NO: 105 - protein, 439 aa, Streptococcus pyogenes
MTIQKRMISCQFTHPSKETYLYQLYASSNVLQLLAFLIKNGSHSRPLTDFARSHFLSNSSAYRMREALIPLLRNFELKLSKNKIVGEEYRIRYLIALLYSKFGIKVYDLTQQDKNIIHSFLSHSSTHLKTSPWLSESFSFYDILLALSWKRHQFSVTIPQTRIFQQLKKLFVYDSLKKSSRDIIETYCQLNFSAGDLDYLYLIYITANNSFASLQWTPEHIRQCCQLFEENDTFRLLLNPIITLLPNLKEQKASLVKALMFFSKSFLFNLQHFIPETNLFVSPYYKGNQKLYTSLKLIVEEWMAKLPGKRYLNHKHFHLFCHYVEQILRNIQPPLVVVFVASNFINAHLLTDSFPRYFSDKSIDFHSYYLLQDNVYQIPDLKPDLVITHSQLIPFVHHELTKGIAVAEISFDESILSIQELMYQVKEEKFQADLTKQLT

SEQ ID NO: 106 - DNA, 2097 bp, Streptococcus pyogenes
atggtaagctcatatatgtttgcgagaggagagaaaatgaataacaaaatgtttttgaacaaagaagccggttttttggtacacacaaaaagaaaaaggcgatttgctgtcactttagtgggagtcttttttctgcttttggcatgtgcgggtgctatcggttttggtcaagtagcctatgctgcggatgagaagactgtgccgaattttaaaagcccagatccagattatccctggtatggttatgattcgtatagaggaatatttgcaagatatcacaatttaaaagtaaatctaaaaggaagtaaggagtatcaagcgtattgttttaacctaacaaaatactttcctcgccccacttatagtactacaaataatttttacaagaaaattgatgggagtggatcagcgttcaaatcttatgcagcgaatcctagggttttagatgagaatttagataaattagaaaaaaatatactgaatgtaatttataatggatataaaagtaatgcaaatggttttatgaatggtatagaagatcttaatgctatactagtaactcaaaacgctatttggtactattcagatagtgctccattaaatgatgttaataaaatgtgggaaagagaggttcggaatggggagattagtgagtcacaagttactttaatgcgtgaggcattgaaaaaactaattgatcccaatttagaagctactgcagctaataaaatcccatcaggatatcgtttaaatatctttaagtctgaaaatgaagattaccaaaatcttttaagtgctgaatatgtacctgatgatccccctaaacctggtgatacgtcagaacataatcctaaaactcccgagttggatggcactccaattcccgaggacccaaaacgtccagatgagagttcagaacctgcgcttcccccattaatgccagagctagatggtgaagaagtcccagaagttccaagcgagagcttagaacctgcgcttcccccattgatgccagagctagatggtgaagaagtcccagaagttccaagcgagagcttagaacctgcgcttcccccattgatgccagagctagatggtgaagaagtcccagaagttccaagcgagagcttagaacctgcgcttcccccattaatgccagagctagatggtgaagaagtcccagaagttccaagcgagagcttagaacctgcgcttcccccattgatgccagagttagatggtgaagaagtccctgaaaaacctagtgttgacttacctattgaagttcctcgttatgagtttaacaataaagaccagtcacctctagcgggtgagtctggtgagacggagtatattaccgaagtctatggaaatcaacagaaccctgttgatattgataaaaaacttccgaatgaaacaggtttttcaggaaatatggttgagacagaagatacgaaagagccagaagtgttgatgggaggtcaaagtgagtctgttgaatttactaaagacactcaaacaggcatgagtggtcaaacaactcctcaggttgagacagaagatacgaaagagccagaagtgttgatgggaggtcaaagtgagtctgttgaatttactaaagacactcaaacaggcatgagtggtcaaacaactcctcaggttgagacagaagatacgaaagagccaggagtgttgatgggaggccaaagtgagtctgttgaatttactaaagacactcaaacaggcatgagtggtcaaacaactcctcaggttgagacagaagacacgaaagagccaggagtgttgatgggaggtcaaagtgagtctgttgaatttactaaagacactcaaacaggcatgagcggtttcagtgaaacagtgaccattgttgaagatacgcgtccgaagttagtgttccattttgacaataatgagcccaaagtggaagagaatcgggaaaagcctacaaaaaatataacacctatccttcctgcaacaggagatattgagaatgttttggcctttcttggaatccttattttgtcagtactttctatttttagccttttaaaaaacaaacaaaacaataaagtctga

SEQ ID NO: 107 - protein, 698 aa, Streptococcus pyogenes
MVSSYMFARGEKMNNKMFLNKEAGFLVHTKRKRRFAVTLVGVFFLLLACAGAIGFGQVAYAADEKTVPNFKSPDPDYPWYGYDSYRGIFARYHNLKVNLKGSKEYQAYCFNLTKYFPRPTYSTTNNFYKKIDGSGSAFKSYAANPRVLDENLDKLEKNILNVIYNGYKSNANGFMNGIEDLNAILVTQNAIWYYSDSAPLNDVNKMWEREVRNGEISESQVTLMREALKKLIDPNLEATAANKIPSGYRLNIFKSENEDYQNLLSAEYVPDDPPKPGDTSEHNPKTPELDGTPIPEDPKRPDESSEPALPPLMPELDGEEVPEVPSESLEPALPPLMPELDGEEVPEVPSESLEPALPPLMPELDGEEVPEVPSESLEPALPPLMPELDGEEVPEVPSESLEPALPPLMPELDGEEVPEKPSVDLPIEVPRYEFNNKDQSPLAGESGETEYITEVYGNQQNPVDIDKKLPNETGFSGNMVETEDTKEPEVLMGGQSESVEFTKDTQTGMSGQTTPQVETEDTKEPEVLMGGQSESVEFTKDTQTGMSGQTTPQVETEDTKEPGVLMGGQSESVEFTKDTQTGMSGQTTPQVETEDTKEPGVLMGGQSESVEFTKDTQTGMSGFSETVTIVEDTRPKLVFHFDNNEPKVEENREKPTKNITPILPATGDIENVLAFLGILILSVLSIFSLLKNKQNNKV

SEQ ID NO: 108 - DNA, 2271 bp, Streptococcus pyogenes
atgaataacaaaaaattgcaaaagaagcaagatgctcctcgggtatcaaacagaaagccaaaacaattaactgtcactttagtgggagtatttttaatgtttttgaccttggtaagttccatgagaggtgctcaaagcatatttggagaggaaaagagaattgaagaagtcagtgttcctaaaataaaaagtccagatgatgcctacccttggtatggctatgattcatatgactctagtcatccttactatgaacgttttaaagtagcacatgatttaagggttaatttaaatggaagtaagagctaccaagtatattgctttaatatcaattctcattatccgaatagaaaaaatgctttttctaaacaatggtttaagagagttgatgggacaggtgatgtgttcacaaattatgctcagacacctaagattcgtggagaatcattgaataataaacttttaagtattatgtacaacgcttatcctaaaaatgctaatggctatatggataagatagaaccattaaatgctattttagtaactcaacaagctgtttggtactattctgacagttcttatggtaatataaaaacgttatgggcatctgagcttaaagacggaaaaatagattttgaacaagtaaaattaatgcgtgaagcttactcaaaactaattagtgatgatttagaagaaacatctaaaaataagctacctcaaggatctaaactgaatatttttgttccgcaagataaatctgttcaaaatttattaagtgcagagtacgtgcctgaatcccctccggcaccaggtcagtctccagaaccgccagtgcaaacaaaaaaaacatcagtcattatcagaaaatatgcggaaggtgactactctaaacttctagagggagcaactttgcgtttaacaggggaagatatcctagattttcaagaaaaagtcttccaaagtaatggaacaggagaaaagattgaattatcaaatgggacttataccttaacagaaacatcatctccagatggatataaaattgcggagccgattaagtttagagtagtgaataaaaaagtatttatcgtccaaaaagatggttctcaagtggaaaatccaaacaaagaagtagcagagccatactcagtggaagcgtacagcgatatgcaagatagtaactatattaatccagaaacgttcactccttatgggaaattttattacgctaaaaataaggataaaagttcacaagttgtctactgttttaatgctgatttacactctccacctgaatcagaggatgggggaggaactatagatcctgatattagtacgatgaaagaagtcaagtacacacatacggcaggtagtgatttgtttaaatacgcgctaagaccgagagatacaaatccagaagacttcttaaagcacattaaaaaagtaattgaaaaaggctacaataaaaaaggtgatagctataatggattaacagaaacacagtttcgcgcggctactcagcttgctatctattactttacagacagcactgacttaaaaaccttaaaaacttataacaatgggaaaggttaccatggatttgaatctatggatgaaaaaaccctagctgtaacaaaagaattaattaattacgctcaagataatagtgcccctcaactaacaaatcttgatttcttcgtacctaataatagcaaataccaatctcttattgggacagaataccatccagatgatttggttgacgtgattcgtatggaagataaaaagcaagaagttattccagtaactcacagtttgacagtgaaaaaaacagtagtcggtgagttgggagataaaactaaaggcttccaatttgaacttgagttgaaagataaaactggacagcctattgttaacactctaaaaactaataatcaagatttagtagctaaagatgggaaatattcatttaatctaaagcatggtgacaccataagaatagaaggattaccgacgggatattcttatactctgaaagagactgaagctaaggattatatagtaaccgttgataacaaagttagtcaagaagctcaatcagcaagtgagaatgtcacagcagacaaagaagtcacttttgaaaaccgtaaagatcttgtcccaccaactggttttattactgatggtggaacctatctgtggttattattgcttgtcccatttggtttgttagtgtggttctttggtcgtaaaggactaaaaaatgactaa

SEQ ID NO: 109 - protein, 756 aa, Streptococcus pyogenes
MNNKKLQKKQDAPRVSNRKPKQLTVTLVGVFLMFLTLVSSMRGAQSIFGEEKRIEEVSVPKIKSPDDAYPWYGYDSYDSSHPYYERFKVAHDLRVNLNGSKSYQVYCFNINSHYPNRKNAFSKQWFKRVDGTGDVFTNYAQTPKIRGESLNNKLLSIMYNAYPKNANGYMDKIEPLNAILVTQQAVWYYSDSSYGNIKTLWASELKDGKIDFEQVKLMREAYSKLISDDLEETSKNKLPQGSKLNIFVPQDKSVQNLLSAEYVPESPPAPGQSPEPPVQTKKTSVIIRKYAEGDYSKLLEGATLRLTGEDILDFQEKVFQSNGTGEKIELSNGTYTLTETSSPDGYKIAEPIKFRVVNKKVFIVQKDGSQVENPNKEVAEPYSVEAYSDMQDSNYINPETFTPYGKFYYAKNKDKSSQVVYCFNADLHSPPESEDGGGTIDPDISTMKEVKYTHTAGSDLFKYALRPRDTNPEDFLKHIKKVIEKGYNKKGDSYNGLTETQFRAATQLAIYYFTDSTDLKTLKTYNNGKGYHGFESMDEKTLAVTKELINYAQDNSAPQLTNLDFFVPNNSKYQSLIGTEYHPDDLVDVIRMEDKKQEVIPVTHSLTVKKTVVGELGDKTKGFQFELELKDKTGQPIVNTLKTNNQDLVAKDGKYSFNLKHGDTIRIEGLPTGYSYTLKETEAKDYIVTVDNKVSQEAQSASENVTADKEVTFENRKDLVPPTGFITDGGTYLWLLLLVPFGLLVWFFGRKGLKND

SEQ ID NO: 110 - DNA, 522 bp, Streptococcus pyogenes
atgactaattacctaaatcgcttaaatgagaatccactatttaaagctttcatacggttagtacttaagatttctattattggatttctaggttacattctatttcagtatgtttttggcgtcatgattgttaacacaaatcagatgagtcctgctgtaagtgctggtgatggagtcttatattatcgtttgactgatcgctatcatattaatgatgtggtggtctatgaggttgataacactttgaaagttggtcgaattgccgctcaagctggcgatgaggttagttttacgcaagaaggaggactgttgattaatgggcatccaccagaaaaagaggtcccttacctgacgtatcctcactcaagtggtccaaactttccctataaagttcctacgggtacgtatttcatattgaatgattatcgtgaagaacgtttggacagtcgttattatggggcgttacccatcaatcaaatcaaagggaaaatctcaactctattaagagtgagaggaatttaa

SEQ ID NO: 111 - protein, 173 aa, Streptococcus pyogenes
MTNYLNRLNENPLFKAFIRLVLKISIIGFLGYILFQYVFGVMIVNTNQMSPAVSAGDGVLYYRLTDRYHINDVVVYEVDNTLKVGRIAAQAGDEVSFTQEGGLLINGHPPEKEVPYLTYPHSSGPNFPYKVPTGTYFILNDYREERLDSRYYGALPINQIKGKISTLLRVRGI

SEQ ID NO: 112 - DNA, 1029 bp, Streptococcus pyogenes
atgaaaaaaaataaattattacttgctactgcaatcttagcaactgctttaggaacagcttctttaaatcaaaacgtaaaagctgagacggcaggggttgttagcagtggtcaattaacaataaaaaaatcaattacaaattttaatgatgatacacttttgatgcctaagacagactatacttttagcgttaatccggatagtgcggctacaggtactgaaagtaatttaccaattaaaccaggtattgctgttaacaatcaagatattaaggtttcttattctaatactgataagacatcaggtaaagaaaaacaagttgttgttgactttatgaaagttacttttcctagcgttggtatttaccgttatgttgttaccgagaataaagggacagcagaaggagttacatatgatgatacaaaatggttagttgacgtctatgttggtaataatgaaaagggaggtcttgaaccaaagtatattgtatctaaaaaaggagattctgctactaaagaaccaatccagtttaataattcattcgaaacaacgtcattaaaaattgaaaaggaagttactggtaatacaggagatcataaaaaagcatttacctttacattaacattgcaaccaaatgaatactatgaggcaagttcggttgtgaaaattgaagagaacggacaaacgaaagatgtgaaaattggggaggcatataagtttactttgaacgatagtcagagtgtgatattgtctaaattaccagttggtattaattataaagttgaagaagcagaagctaatcaaggtggatatactacaacagcaactttaaaagatggagaaaagttatctacttataacttaggtcaggaacataaaacagacaagactgctgatgaaatcgttgtcacaaataaccgtgacactcaagttccaactggtgttgtaggcacccttgctccatttgcagttcttagcattgtggctattggtggagttatctatattacaaaacgtaaaaaagcttaa

SEQ ID NO: 113 - protein, 342 aa, Streptococcus pyogenes
MKKNKLLLATAILATALGTASLNQNVKAETAGVVSSGQLTIKKSITNFNDDTLLMPKTDYTFSVNPDSAATGTESNLPIKPGIAVNNQDIKVSYSNTDKTSGKEKQVVVDFMKVTFPSVGIYRYVVTENKGTAEGVTYDDTKWLVDVYVGNNEKGGLEPKYIVSKKGDSATKEPIQFNNSFETTSLKIEKEVTGNTGDHKKAFTFTLTLQPNEYYEASSVVKIEENGQTKDVKIGEAYKFTLNDSQSVILSKLPVGINYKVEEAEANQGGYTTTATLKDGEKLSTYNLGQEHKTDKTADEIVVTNNRDTQVPTGVVGTLAPFAVLSIVAIGGVIYITKRKKA

SEQ ID NO: 114 - DNA, 726 bp, Streptococcus pyogenes
atgatgatgacaattgtacaggttatcaataaagccattgatactctcattcttatcttttgtttagtcgtactatttttagctggttttggtttgtgggattcttatcatctctatcaacaagcagacgcttctaatttcaaaaaatttaaaacagctcaacaacagcctaaatttgaagacttgttagctttgaatgaggatgtcattggttggttaaatatcccggggactcatattgattatcctctagttcagggaaaaacgaatttagagtatattaataaagcagttgatggcagtgttgccatgtctggtagtttatttttagatacacggaatcataatgattttacggacgattactctctgatttatggccatcatatggcaggtaatgccatgtttggcgaaattccaaaatttttaaaaaaggattttttcaacaaacataataaagctatcattgaaacaaaagagagaaaaaaactaaccgtcactatttttgcttgtctcaagacagatgcctttgaccagttagtttttaatcctaatgctattaccaatcaagaccaacaaaggcagctcgttgattatatcagtaaaagatcaaaacaatttaaacctgttaaattgaagcatcatacaaagttcgttgctttttcaacgtgtgaaaatttttctactgacaatcgtgttatcgttgtcggtactattcaagaataa

SEQ ID NO: 115 - protein, 241 aa, Streptococcus pyogenes
MMMTIVQVINKAIDTLILIFCLVVLFLAGFGLWDSYHLYQQADASNFKKFKTAQQQPKFEDLLALNEDVIGWLNIPGTHIDYPLVQGKTNLEYINKAVDGSVAMSGSLFLDTRNHNDFTDDYSLIYGHHMAGNAMFGEIPKFLKKDFFNKHNKAIIETKERKKLTVTIFACLKTDAFDQLVFNPNAITNQDQQRQLVDYISKRSKQFKPVKLKHHTKFVAFSTCENFSTDNRVIVVGTIQE

SEQ ID NO: 116 - DNA, 560 bp, Streptococcus pyogenes
atgttattttctgtcgtaatgatattaaccatgctggcctttaatcagactgttttagcaaaagacagcactgttcaaactagcattagtgtcgaaaatgtcttagagagagcaggcgatagtaccccattttcgattgcattagaatcaattgatgcgatgaaaacaatagaagaaataacaattgctggttctggaaaagcaagcttttcccctctgaccttcacaacagttgggcaatatacttatcgtgtttatcagaagccttcacaaaataaagattatcaagcagatactactgtatttgacgttcttgtctatgtgacctatgatgaagatgggactctagtcgcaaaagttatttctcgaagggctggagacgaagaaaaatcagcgattacttttaagcccaaacggttagtaaaaccaataccgcctagacaacctaacatccctaaaaccccattaccattagctggtgaagtaaaaagtttattgggtatcttaagtatcgtattactggggttactagttcttctttatgttaaaaaactgaagag

SEQ ID NO: 117 - protein, 189 aa, Streptococcus pyogenes
MLFSVVMILTMLAFNQTVLAKDSTVQTSISVENVLERAGDSTPFSIALESIDAMKTIEEITIAGSGKASFSPLTFTTVGQYTYRVYQKPSQNKDYQADTTVFDVLVYVTYDEDGTLVAKVISRRAGDEEKSAITFKPKRLVKPIPPRQPNIPKTPLPLAGEVKSLLGILSIVLLGLLVLLYVKKLKSKL

SEQ ID NO: 118 - DNA, 1206 bp, Streptococcus pyogenes
atggttatattcgatttaaaacatgtgcaaacattacacagcttgtctcaattacctatttcagtgatgtcacaagataaggcacttattcaagtatatggtaatgacgactatttattatgttactatcaatttttaaagcatctagctattcctcaagctgcacaagatgttattttttatgagggtttatttgaagagtcctttatgatttttcctctttgtcactacattattgccattggacctttctacccttattcacttaataaagactatcaggaacaattagctaataattttttaaaacattcttctcatcgtagcaaagaagagctcttatcctatatggcacttgtcccacattttccaattaataatgtgcggaaccttttgatagctattgacgctttttttgacacacaatttgagacgacttgccaacaaacaattcatcaattgttgcagcattcaaaacagatgactgctgatcctgatatcattcatcgccttaagcatattagcaaagcatctagccaactaccgcctgttttagagcacctaaatcatattatggatctggtaaagctaggcaatccacaattgctcaagcaagaaatcaatcgcatccccttatcaagtatcacctcatcttctatttctgctctaagggcggaaaagaacctcactgttatctatttaactaggttactggaattcagttttgtagaaaatactgacgtagcaaagcattatagccttgtcaaatactacatggccttaaatgaagaagcgagtgacttgctcaaagttttgagaattcgctgtgcagccatcatccatttttccgaatcattaaccaataaaagtatttctgataaacgtcaaatgtacaatagtgtgcttcattatgtcgatagtcacctgtattccaaattaaaggtatctgatatcgctaagcgcctatatgtttccgaatctcacttacgttcagtctttaaaaaatactcaaatgtttccttacaacattatattctaagtacaaaaatcaaagaagctcaactactcttaaaacgaggaattcctgttggagaagtggctaaaagcttatatttttatgacactacccattttcataaaatctttaaaaaatacacgggtatttcttcaaaagactatcttgctaaataccgagataatatttaa

SEQ ID NO: 119 - protein, 401 aa, Streptococcus pyogenes
MVIFDLKHVQTLHSLSQLPISVMSQDKALIQVYGNDDYLLCYYQFLKHLAIPQAAQDVIFYEGLFEESFMIFPLCHYIIAIGPFYPYSLNKDYQEQLANNFLKHSSHRSKEELLSYMALVPHFPINNVRNLLIAIDAFFDTQFETTCQQTIHQLLQHSKQMTADPDIIHRLKHISKASSQLPPVLEHLNHIMDLVKLGNPQLLKQEINRIPLSSITSSSISALRAEKNLTVIYLTRLLEFSFVENTDVAKHYSLVKYYMALNEEASDLLKVLRIRCAAIIHFSESLTNKSISDKRQMYNSVLHYVDSHLYSKLKVSDIAKRLYVSESHLRSVFKKYSNVSLQHYILSTKIKEAQLLLKRGIPVGEVAKSLYFYDTTHFHKIFKKYTGISSKDYLAKYRDNI

SEQ ID NO: 120 - DNA, 3486 bp, Streptococcus pyogenes
atgacacaaaaaaatagctataagttaagcttcctgttatccctaacaggatttattttaggtttattattggtttttataggattgtccggagtatcagtaggacatgcggaaacaagaaatggagcaaacaaacaaggatcttttgaaatcaagaaagtcgaccaaaacaataagcctttaccgggagcaactttttcactgacatcaaaggatggcaagggaacatctgttcaaacgttcacttcaaatgataaaggtattgtagatgctcaaaatctccaaccagggacttataccttaaaagaagaaacagcaccagatggttatgataaaaccagccggacttggacagtgactgtttatgagaacggctataccaagttggttgaaaatccctataatggggaaatcatcagtaaagcagggtcaaaagatgttagtagttctttacagttggaaaatcccaaaatgtcagttgtttctaaatatgggaaaacagaggttagtagtggcgcagcggatttctaccgcaaccatgccgcctattttaaaatgtcttttgagttgaaacaaaaggataaatctgaaacaatcaacccaggtgatacctttgtgttacagctggatagacgtctcaatcctaaaggtatcagtcaagatatccctaaaatcatttacgacagtgcaaatagtccgcttgcgattggaaaataccatgctgagaaccatcaacttatctatactttcacagattatattgcgggtttagataaagtccagttgtctgcagaattgagcttattcctagagaataaggaagtgttggaaaatactagtatctcaaattttaagagtaccataggtgggcaggagatcacctataaaggaacggttaatgttctttatggaaatgagagcactaaagaaagcaattatattactaatggattgagcaatgtgggtgggagtattgaaagctacaacaccgaaacgggagaatttgtctggtatgtttatgtcaatccaaaccgtaccaatattccttatgcgaccatgaatttatggggatttggaagggctcgttcaaatacaagcgacttagaaaacgacgctaatacaagtagtgctgagcttggagagattcaggtctatgaagtacctgaaggagaaaaattaccatcaagttatggggttgatgttacaaaacttactttaagaacggatatcacagcaggcctaggaaatggttttcaaatgaccaaacgtcagcgaattgactttggaaataatatccaaaataaagcatttatcatcaaagtaacagggaaaacagaccaatctggtaagccattggttgttcaatccaatttggcaagttttcgtggtgcttctgaatatgctgcttttactccagttggaggaaatgtctacttccaaaacgaaattgccttgtctccttctaagggtagtggttctgggaaaagtgaatttactaagccctctattacagtagcaaatctaaaacgagtggctcagcttcgctttaagaaaatgtcaactgacaatgtgccattgccagaagcggcttttgagctgcgttcatcaaatggtaatagtcagaaattagaagccagttcaaacacacaaggagaggttcactttaaggacctgacctcgggcacatatgacctgtatgaaacaaaagcgccaaaaggttatcagcaggtgacagagaaattggcgaccgttactgttgatactaccaaacctgctgaggaaatggtcacttggggaagcccacattcgtctgtaaaagtagaagctaacaaagaagtcacgattgtcaaccataaagaaacccttacgttttcagggaagaaaatttgggagaatgacagaccagatcaacgcccagcaaagattcaagtgcaactgttgcaaaatggtcaaaagatgcctaaccagattcaagaagtaacgaaggataacgattggtcttatcacttcaaagacttgcctaagtacgatgccaagaatcaggagtataagtactcagttgaagaagtaaatgttccagacggctacaaggtgtcgtatttaggaaatgatatatttaacaccagagaaacagaatttgtgtttgaacagaataactttaaccttgaatttggaaatgctgaaataaaaggtcaatctgggtcaaaaatcattgatgaagacacgctaacgtctttcaaaggtaagaaaatttggaaaaatgatacggcagaaaatcgtccccaagccattcaagtgcagctttatgctgatggagtggctgtggaaggtcaaaccaaatttatttctggctcaggtaatgagtggtcatttgagtttaaaaacttgaagaagtataatggaacaggtaatgacatcatttactcagttaaagaagtaactgttccaacaggttatgatgtgacttactcagctaatgatattattaataccaaacgtgaggttattacacaacaaggaccgaaactagagattgaagaaacgcttccgctagaatcaggtgcttcaggcggtaccactactgtcgaagactcacgcccagttgataccttatcaggtttatcaagtgagcaaggtcagtccggtgatatgacaattgaagaagatagtgctacccatattaaattctcaaaacgtgatattgacggcaaagagttagctggtgcaactatggagttgcgtgattcatctggtaaaactattagtacatggatttcagatggacaagtgaaagatttctacctgatgccaggaaaatatacatttgtcgaaaccgcagcaccagacggttatgagatagcaactgctattacctttacagttaatgagcaaggtcaggttactgtaaatggcaaagcaactaaaggtgacactcatattgtcatggttgatgcttacaagccaactaagggttcaggtcaggttattgatattgaagaaaagcttccagacgagcaaggtcattctggttcaactactgaaatagaagacagtaaatcttcagaccttatcattggcggtcaaggtgaagttgttgacacaacagaagacacacaaagtggtatgacgggccattctggctcaactactgaaatagaagatagcaagtcttcagacgttatcattggtggtcaggggcaggttgtcgagacaacagaggatacccaaactggcatgtacggggattctggttgtaaaacggaagtcgaagatactaaactagtacaatccttccactttgataacaaggaaccagaaagtaactctgagattcctaaaaaagataagccaaagagtaatactagtttaccagcaactggtgagaagcaacataatatgttcttttggatggttacttcttgctcacttattagtagtgtttttgtaatatcactaaaatccaaaaaacgcctatcatcatgttaa

SEQ ID NO: 121 - protein, 1161 aa, Streptococcus pyogenes
MTQKNSYKLSFLLSLTGFILGLLLVFIGLSGVSVGHAETRNGANKQGSFEIKKVDQNNKPLPGATFSLTSKDGKGTSVQTFTSNDKGIVDAQNLQPGTYTLKEETAPDGYDKTSRTWTVTVYENGYTKLVENPYNGEIISKAGSKDVSSSLQLENPKMSVVSKYGKTEVSSGAADFYRNHAAYFKMSFELKQKDKSETINPGDTFVLQLDRRLNPKGISQDIPKIIYDSANSPLAIGKYHAENHQLIYTFTDYIAGLDKVQLSAELSLFLENKEVLENTSISNFKSTIGGQEITYKGTVNVLYGNESTKESNYITNGLSNVGGSIESYNTETGEFVWYVYVNPNRTNIPYATMNLWGFGRARSNTSDLENDANTSSAELGEIQVYEVPEGEKLPSSYGVDVTKLTLRTDITAGLGNGFQMTKRQRIDFGNNIQNKAFIIKVTGKTDQSGKPLVVQSNLASFRGASEYAAFTPVGGNVYFQNEIALSPSKGSGSGKSEFTKPSITVANLKRVAQLRFKKMSTDNVPLPEAAFELRSSNGNSQKLEASSNTQGEVHFKDLTSGTYDLYETKAPKGYQQVTEKLATVTVDTTKPAEEMVTWGSPHSSVKVEANKEVTIVNHKETLTFSGKKIWENDRPDQRPAKIQVQLLQNGQKMPNQIQEVTKDNDWSYHFKDLPKYDAKNQEYKYSVEEVNVPDGYKVSYLGNDIFNTRETEFVFEQNNFNLEFGNAEIKGQSGSKIIDEDTLTSFKGKKIWKNDTAENRPQAIQVQLYADGVAVEGQTKFISGSGNEWSFEFKNLKKYNGTGNDIIYSVKEVTVPTGYDVTYSANDIINTKREVITQQGPKLEIEETLPLESGASGGTTTVEDSRPVDTLSGLSSEQGQSGDMTIEEDSATHIKFSKRDIDGKELAGATMELRDSSGKTISTWISDGQVKDFYLMPGKYTFVETAAPDGYEIATAITFTVNEQGQVTVNGKATKGDTHIVMVDAYKPTKGSGQVIDIEEKLPDEQGHSGSTTEIEDSKSSDLIIGGQGEVVDTTEDTQSGMTGHSGSTTEIEDSKSSDVIIGGQGQVVETTEDTQTGMYGDSGCKTEVEDTKLVQSFHFDNKEPESNSEIPKKDKPKSNTSLPATGEKQHNMFFWMVTSCSLISSVFVISLKSKKRLSSC

SEQ ID NO: 122 - protein, 5 aa, Streptococcus pyogenes
  VARIANT 3: Xaa = Any Amino Acid
LPXTG

SEQ ID NO: 123 - protein, 5 aa, Streptococcus agalactiae
FPKTG

SEQ ID NO: 124 - protein, 5 aa, Streptococcus agalactiae
IPKTG

SEQ ID NO: 125 - DNA, 2118 bp, Streptococcus agalactiae
ttaagcttcctttgattggcgtcttttcatgataactactgctccaagcataatgcttaaaccaataattgtgaaaagaattgtaccaataccacctgtttgtgggattgttacctttttattttctacacgtgtcgcatctttttggttgctgttagcaacgtagtcaatgttaccacctgttatgtatgacccttgattaactacaaacttaatattacctgccaacttagcaaatcctgctggagcaagtgtttcttcaaggttgtaagtaccgtctgcaagacctgtaacttcaaattgaccttgatcgtttgaagtgtaggtaatggctctagccttatctgttatccactcataagctgtacgagcctcaatgaaggctgcatcgtaatctgcttgtttagttttgataagttcttttgcagtaattcctttttcacctttttggtctgttgcagacaacttgttataagcagcgatagcttcatctaaagctattttcttagcagctaaagttttttgaccttctgattgatctgctttaagagcaaggtatttacctgctgagtttttcacaacgaattgtgcaccagccaaacggtcaccttgttcattagttttgacaaatttcttaccatgagtttcaacttttggttcagttgggttcaatggtgttgggttatcagaatctttggtattggtaatggttactttaccattttctagatttattgcacttccgtaaccagaaacacgttctgagatcatgtatgatttgttttctagaccagtgaatttacccgagaagttaccagatacttcaaatttgataccatttccaaggtcgattgtacctttagatgtttttgtcaatgatactgaagcaacagttttatctttatctttcaatgtgtaaacaacgtttacaccatcaggtgcaattccgtcagaccaagttttagcaactgttacttcaccctttgaaggtgtaacaggaagttcagtcaagtctttacctggtttgttaccatacgacaatttgatatcattggattctggattatcaataattgcttgaccattaacagtagcactataagtcaatgtaaattcaatatcagctgttttagctgctttttccaatttgcccaatccatcagctgtgaattttaatgtgaaaccacgggcatcaatgctaagttcatagtctgtatccttagcaaaagtttctgtagttcctgaagctttaaggctaacagttgaacccattgtcaaaccatttgacattatatctgtccaaaccaagttttcgtatttagaacctttgtgaatttttgttttaacttcataaggaacaactttaccgatttcagcagtagcagttgctttgtcacgtgcataattaccataatttgcgccagctgtcaaaagtctattaacatctgtcaatgctgtcaaatcgtttgttttagcaaagtttttatcaatttctggtttttcttcagtgttctttggataaacatgggcatcagcaacaacaccatcttcatttaccaatggaagagtgatgttaactggaaccgcttttgaagcagccaggagggaaccattattgttgtaagtagattttgatttaacttcaacaattttaaactcgcctttcaatcctttggtgttgaaaacaagtccagtatctccctctggtgtcaatccagacacggcctcatcaatatttactgttatttcaggagtaccatctttattaattaaggctggtgttaatttgttaccttcttttgccttaacatattgcactttaccacttttatcttctttcaaagctaaagcaaagaacgcaccttcgatttctttagatccctcgccaaagtaaccagcaaggtcagaaatagctccacctttgtagtcttttccgttaagacctgtagttcctgggaagttacttttgttaagatttgattcggtttgcaaaatcttgtgcaaagtcactgtattagttgttgcttcatccgcaaacgctggtgcaactgagagcaatgacgttaaagtcagtaacaatgccgagaacattgcaaaatatttgttgattcttttcat

SEQ ID NO: 126 - protein, 630 aa, Streptococcus agalactiae
MKRINKYFAMFSALLLTLTSLLSVAPAFADEATTNTVTLHKILQTESNLNKSNFPGTTGLNGKDYKGGAISDLAGYFGEGSKEIEGAFFALALKEDKSGKVQYVKAKEGNKLTPALINKDGTPEITVNIDEAVSGLTPEGDTGLVFNTKGLKGEFKIVEVKSKSTYNNNGSLLAASKAVPVNITLPLVNEDGVVADAHVYPKNTEEKPEIDKNFAKTNDLTALTDVNRLLTAGANYGNYARDKATATAEIGKVVPYEVKTKIHKGSKYENLVWTDIMSNGLTMGSTVSLKASGTTETFAKDTDYELSIDARGFTLKFTADGLGKLEKAAKTADIEFTLTYSATVNGQAIIDNPESNDIKLSYGNKPGKDLTELPVTPSKGEVTVAKTWSDGIAPDGVNVVYTLKDKDKTVASVSLTKTSKGTIDLGNGIKFEVSGNFSGKFTGLENKSYMISERVSGYGSAINLENGKVTITNTKDSDNPTPLNPTEPKVETHGKKFVKTNEQGDRLAGAQFVVKNSAGKYLALKADQSEGQKTLAAKKIALDEAIAAYNKLSATDQKGEKGITAKELIKTKQADYDAAFIEARTAYEWITDKARAITYTSNDQGQFEVTGLADGTYNLEETLAPAGFAK

SEQ ID NO: 127 - DNA, 2025 bp, Streptococcus agalactiae
atgaaaaaaatcaacaaatgtcttacaatgttctcgacactgctattgatcttaacgtcactattctcagttgcaccagcgtttgcggacgacgcaacaactgatactgtgaccttgcacaagattgtcatgccacaagctgcatttgataactttactgaaggtacaaaaggtaagaatgatagcgattatgttggtaaacaaattaatgaccttaaatcttattttggctcaaccgatgctaaagaaatcaagggtgctttctttgttttcaaaaatgaaactggtacaaaattcattactgaaaatggtaaggaagtcgatactttggaagctaaagatgctgaaggtggtgctgttctttcagggttaacaaaagacaatggttttgtttttaacactgctaagttaaaaggaatttaccaaatcgttgaattgaaagaaaaatcaaactacgataacaacggttctatcttggctgattcaaaagcagttccagttaaaatcactctgccattggtaaacaaccaaggtgttgttaaagatgctcacatttatccaaagaatactgaaacaaaaccacaagtagataagaactttgcagataaagatcttgattatactgacaaccgaaaagacaaaggtgttgtctcagcgacagttggtgacaaaaaagaatacatagttggaacaaaaattcttaaaggctcagactataagaaactggtttggactgatagcatgactaaaggtttgacgttcaacaacaacgttaaagtaacattggatggtgaagattttcctgttttaaactacaaactcgtaacagatgaccaaggtttccgtcttgccttgaatgcaacaggtcttgcagcagtagcagcagctgcaaaagacaaagatgttgaaatcaagatcacttactcagctacggtgaacggctccactactgttgaaattccagaaaccaatgatgttaaattggactatggtaataacccaacggaagaaagtgaaccacaagaaggtactccagctaaccaagaaattaaagtcattaaagactgggcagtagatggtacaattactgatgctaatgttgcagttaaagctatctttaccttgcaagaaaaacaaacggatggtacatgggtgaacgttgcttcacacgaagcaacaaaaccatcacgctttgaacatactttcacaggtttggataatgctaaaacttaccgcgttgtcgaacgtgttagcggctacactccagaatacgtatcatttaaaaatggtgttgtgactatcaagaacaacaaaaactcaaatgatccaactccaatcaacccatcagaaccaaaagtggtgacttatggacgtaaatttgtgaaaacaaatcaagctaacactgaacgcttggcaggagctaccttcctcgttaagaaagaaggcaaatacttggcacgtaaagcaggtgcagcaactgctgaagcaaaggcagctgtaaaaactgctaaactagcattggatgaagctgttaaagcttataacgacttgactaaagaaaaacaagaaggccaagaaggtaaaacagcattggctactgttgatcaaaaacaaaaagcttacaatgacgcttttgttaaagctaactactcatatgaatgggttgcagataaaaaggctgataatgttgttaaattgatctctaacgccggtggtcaatttgaaattactggtttggataaaggcacttatggcttggaagaaactcaagcaccagcaggttatgcgacattgtcaggtgatgtaaactttgaagtaactgccacatcatatagcaaaggggctacaactgacatcgcatatgataaaggctctgtaaaaaaagatgcccaacaagttcaaaacaaaaaagtaaccatcccacaaacaggtggtattggtacaattcttttcacaattattggtttaagcattatgcttggagcagtagttatcatgaaaaaacgtcaatcagaggaagcttaa

SEQ ID NO: 128 - protein, 674 aa, Streptococcus agalactiae
MKKINKCLTMFSTLLLILTSLFSVAPAFADDATTDTVTLHKIVMPQAAFDNFTEGTKGKNDSDYVGKQINDLKSYFGSTDAKEIKGAFFVFKNETGTKFITENGKEVDTLEAKDAEGGAVLSGLTKDNGFVFNTAKLKGIYQIVELKEKSNYDNNGSILADSKAVPVKITLPLVNNQGVVKDAHIYPKNTETKPQVDKNFADKDLDYTDNRKDKGVVSATVGDKKEYIVGTKILKGSDYKKLVWTDSMTKGLTFNNNVKVTLDGEDFPVLNYKLVTDDQGFRLALNATGLAAVAAAAKDKDVEIKITYSATVNGSTTVEIPETNDVKLDYGNNPTEESEPQEGTPANQEIKVIKDWAVDGTITDANVAVKAIFTLQEKQTDGTWVNVASHEATKPSRFEHTFTGLDNAKTYRVVERVSGYTPEYVSFKNGVVTIKNNKNSNDPTPINPSEPKVVTYGRKFVKTNQANTERLAGATFLVKKEGKYLARKAGAATAEAKAAVKTAKLALDEAVKAYNDLTKEKQEGQEGKTALATVDQKQKAYNDAFVKANYSYEWVADKKADNVVKLISNAGGQFEITGLDKGTYGLEETQAPAGYATLSGDVNFEVTATSYSKGATTDIAYDKGSVKKDAQQVQNKKVTIPQTGGIGTILFTIIGLSIMLGAVVIMKKRQSEEA

SEQ ID NO: 129 - protein, 5 aa, Streptococcus agalactiae
IPQTG

SEQ ID NO: 130 - protein, 5 aa, Streptococcus agalactiae
LPKTG

SEQ ID NO: 131 - protein, 5 aa, Streptococcus agalactiae
LPSTG

SEQ ID NO: 132 - protein, 5 aa, Streptococcus agalactiae
LPFTG

SEQ ID NO: 133 - protein, 5 aa, Streptococcus agalactiae
  VARIANT 3: Xaa = Any Amino Acid
IPXTG

SEQ ID NO: 134 - protein, 5 aa, Streptococcus pyogenes
  VARIANT 3: Xaa = Any Amino Acid
LPXSG

SEQ ID NO: 135 - protein, 5 aa, Streptococcus pyogenes
  VARIANT 3: Xaa = Any Amino Acid
VVXTG

SEQ ID NO: 136 - protein, 5 aa, Streptococcus pyogenes
  VARIANT 3: Xaa = Any Amino Acid
EVXTG

SEQ ID NO: 137 - protein, 5 aa, Streptococcus pyogenes
  VARIANT 3: Xaa = Any Amino Acid
VPXTG

SEQ ID NO: 138 - protein, 5 aa, Streptococcus pyogenes
  VARIANT 3: Xaa = Any Amino Acid
QVXTG

SEQ ID NO: 139 - protein, 5 aa, Streptococcus pyogenes
  VARIANT 3: Xaa = Any Amino Acid
LPXAG

SEQ ID NO: 140 - protein, 5 aa, Streptococcus pyogenes
QVPTG

SEQ ID NO: 141 - protein, 5 aa, Streptococcus pyogenes
  VARIANT 3: Xaa = Any Amino Acid
FPXTG

SEQ ID NO: 142 - protein, 5 aa, Streptococcus agalactiae
NPQTN

SEQ ID NO: 143 - protein, 6 aa, Streptococcus agalactiae
  VARIANT 1, 3: Xaa = Any Amino Acid
XPXTGG

SEQ ID NO: 144 - protein, 6 aa, Streptococcus agalactiae
  VARIANT 3, 6: Xaa = Any Amino Acid
LPXTAX

SEQ ID NO: 145 - protein, 6 aa, Streptococcus agalactiae
  VARIANT 3, 6: Xaa = Any Amino Acid
LAXTGX

SEQ ID NO: 146 - protein, 15 aa, Streptococcus agalactiae
  VARIANT 5, 6, 7, 8, 9, 10, 11, 12, 13, 14: Xaa = Any Amino Acid
YPKNXXXXXXXXXXK

SEQ ID NO: 147 - protein, 14 aa, Streptococcus agalactiae
  VARIANT 5, 6, 7, 8, 9, 10, 11, 12, 13: Xaa = Any Amino Acid
YPKNXXXXXXXXXK

SEQ ID NO: 148 - protein, 11 aa, Streptococcus agalactiae
  VARIANT 4, 5, 6, 7, 8, 9, 10: Xaa = Any Amino Acid
YPKXXXXXXXK

SEQ ID NO: 149 - protein, 15 aa, Streptococcus agalactiae
  VARIANT 4, 5, 6, 7, 8, 9, 10, 11, 12, 13, 14: Xaa = Any Amino Acid
YPKXXXXXXXXXXXK

SEQ ID NO: 150 - protein, 13 aa, Streptococcus agalactiae
  VARIANT 4, 5, 6, 7, 8, 9, 10, 11, 12: Xaa = Any Amino Acid
PKNXXXXXXXXXK

SEQ ID NO: 151 - protein, 10 aa, Streptococcus agalactiae
  VARIANT 2, 3, 4, 6: Xaa = Any Amino Acid
WXXXVXVYPK

SEQ ID NO: 152 - protein, 12 aa, Streptococcus agalactiae
  VARIANT 2, 4, 7, 10: Xaa = Any Amino Acid
YXLXETXAPXGY

SEQ ID NO: 153 - protein, 12 aa, Streptococcus agalactiae
  VARIANT 2, 4, 6, 7, 8, 9, 10: Xaa = Any Amino Acid
YXLXEXXXXXGY

SEQ ID NO: 154 - protein, 12 aa, Streptococcus agalactiae
  VARIANT 2, 4, 6, 7, 8, 10: Xaa = Any Amino Acid
YXLXEXXXPXGY

SEQ ID NO: 155 - protein, 12 aa, Streptococcus agalactiae
YKLKETKAPEGY

SEQ ID NO: 156 - protein, 12 aa, Streptococcus agalactiae
YVLKEIETQSGY

SEQ ID NO: 157 - protein, 12 aa, Streptococcus agalactiae
YKLYEISSPDGY

SEQ ID NO: 158 - protein, 13 aa, Streptococcus agalactiae
  VARIANT 5, 6, 7, 8, 9, 10, 11, 12: Xaa = Any Amino Acid
YPKNXXXXXXXXK

SEQ ID NO: 159 - protein, 11 aa, Streptococcus agalactiae
  VARIANT 3, 4, 5, 6, 7, 8, 9, 10: Xaa = Any Amino Acid
PKXXXXXXXXK

SEQ ID NO: 160 - protein, 13 aa, Streptococcus agalactiae
  VARIANT 4, 5, 6, 7, 8, 9, 10, 11, 12: Xaa = Any Amino Acid
YPKXXXXXXXXXK

SEQ ID NO: 161 - protein, 12 aa, Streptococcus agalactiae
  VARIANT 4, 5, 6, 7, 8, 9, 10, 11: Xaa = Any Amino Acid
PKNXXXXXXXXK

SEQ ID NO: 162 - protein, 13 aa, Streptococcus agalactiae
  VARIANT 3, 4, 5, 6, 7, 8, 9, 10, 11, 12: Xaa = Any Amino Acid
PKXXXXXXXXXXK

SEQ ID NO: 163 - protein, 11 aa, Streptococcus agalactiae
  VARIANT 2, 4, 7, 10: Xaa = Any Amino Acid
YXLXETXAPXG

SEQ ID NO: 164 - protein, 12 aa, Streptococcus agalactiae
  VARIANT 2, 3, 4, 6, 7, 9, 10: Xaa = Any Amino Acid
YXXXEXXAXXGY

SEQ ID NO: 165 - protein, 12 aa, Streptococcus agalactiae
  VARIANT 2, 4, 6, 7, 8, 10: Xaa = Any Amino Acid
YXLXEXXXPXDY

SEQ ID NO: 166 - protein, 5 aa, Streptococcus pyogenes
LPSTG

SEQ ID NO: 167 - protein, 6 aa, Streptococcus pyogenes
  VARIANT 3: Xaa = Pro or Val
VPXPTG

SEQ ID NO: 168 - protein, 5 aa, Streptococcus agalactiae
NPKTN

SEQ ID NO: 169 - protein, 5 aa, Streptococcus agalactiae
NPQTG

SEQ ID NO: 170 - protein, 5 aa, Streptococcus agalactiae
NPKTG

SEQ ID NO: 171 - protein, 420 aa, Streptococcus pneumoniae
MEHINHTTLLIGIKDKNITLNKAIQHDTHIEVFATLDYHPPKCKHCKGKQIKYDFQKPSKIPFIEIGGFPSLIHLKKRRFQCKSCRKVTVAETTLVQKNCQISEMVRQKIAQLLLNREALTHIASKLAISTSTSTVYRKLKQFHFQEDYTTLPEILSWDEFSYQKGKLAFIAQDFNTKKIMTILDNRRQTTIRNHFFKYSKEARKKVKVVTVDMSGSYIPLIKKLFPNAKIVLDRFHIVQHMSRALNQTRINIMKQFDDKSLEYRALKYYWKFILKDSRKLSLKPFYARTFRETLTPRECLKKIFTLVPELKDYYDLYQLLLFHLQEKNTDQFWGLIQDTLPHLNRTFKTTLSTFICYKNYITNAIELPYSNAKLEATNKLIKDIKRNAFGFRNFENFKKRIFIALNIKKERTKFVLSRA

SEQ ID NO: 172 - protein, 509 aa, Streptococcus pneumoniae; identical to SEQ ID NO: 87

SEQ ID NO: 173 - protein, 890 aa, Streptococcus pneumoniae
MLNRETHMKKVRKIFQKAVAGLCCISQLTAFSSIVALAETPETSPAIGKVVIKETGEGGALLGDAVFELKNNTDGTTVSQRTEAQTGEAIFSNIKPGTYTLTEAQPPVGYKPSTKQWTVEVEKNGRTTVQGEQVENREEALSDQYPQTGTYPDVQTPYQIIKVDGSEKNGQHKALNPNPYERVIPEGTLSKRIYQVNNLDDNQYGIELTVSGKTTVETKEASTPLDVVILLDNSNSMSNIRHNHAHRAEKAGEATRALVDKITSNPDNRVALVTYGSTIFDGSEATVEKGVADANGKILNDSALWTFDRTTFTAKTYNYSFLNLTSDPTDIQTIKDRIPSDAEELNKDKLMYQFGATFTQKALMTADDILTKQARPNSKKVIFHITDGVPTMSYPINFKYTGTTQSYRTQLNNFKAKTPNSSGILLEDFVTWSADGEHKIVRGDGESYQMFTKKPVTDQYGVHQILSITSMEQRAKLVSAGYRFYGTDLYLYWRDSILAYPFNSSTDWITNHGDPTTWYYNGNMAQDGYDVFTVGVGVNGDPGTDEATATRFMQSISSSPDNYTNVADPSQILQELNRYFYTIVNEKKSIENGTITDPMGELIDFQLGADGRFDPADYTLTANDGSSLVNNVPTGGPQNDGGLLKNAKVFYDTTEKRIRVTGLYLGTGEKVTLTYNVRLNDQFVSNKFYDTNGRTTLHPKEVEKNTVRDFPIPKIRDVRKYPEITIPKEKKLGEIEFIKINKNDKKPLRDAVFSLQKQHPDYPDIYGAIDQNGTYQNVRTGEDGKLTFKNLSDGKYRLFENSEPAGYKPVQNKPIVAFQIVNGEVRDVTSIVPQDIPAGYEFTNDKHYITNEPIPPKREYPRTGGIGMLPFYLIGCMMMGGVLLYTRKHP

SEQ ID NO: 174 - protein, 644 aa, Streptococcus pneumoniae
MKSINKFLTMLAALLLTASSLFSAATVFAADNVSTAPDAVTKTLTIHKLLLSEDDLKTWDTNGPKGYDGTQSSLKDLTGVVAEEIPNVYFELQKYNLTDGKEKENLKDDSKWTTVHGGLTTKDGLKIETSTLKGVYRIREDRTKTTYVGPNGQVLTGSKAVPALVTLPLVNNNGTVIDAHVFPKNSYNKPVVDKRIADTLNYNDQNGLSIGTKIPYVVNTTIPSNATFATSFWSDEMTEGLTYNEDVTITLNNVAMDQADYEVTKGNNGFNLKLTEAGLAKINGKDADQKIQITYSATLNSLAVADIPESNDITYHYGNHQDHGNTPKPTKPNNGQITVTKTWDSQPAPEGVKATVQLVNAKTGEKVGAPVELSENNWTYTWSGLDNSIEYKVEEEYNGYSAEYTVESKGKLGVKNWKDNNPAPINPEEPRVKTYGKKFVKVDQKDTRLENAQFVVKKADSNKYIAFKSTAQQAADEKAAATAKQKLDAAVAAYTNAADKQAAQALVDQAQQEYNVAYKEAKFGYVEVAGKDEAMVLTSNTDGQFQISGLAAGTYKLEEIKAPEGFAKIDDVEFVVGAGSWNQGEFNYLKDVQKNDATKVVNKKITIPQTGGIGTIIFAVAGAAIMGIAVYAYVKNNKDEDQLA

SEQ ID NO: 175 - protein, 401 aa, Streptococcus pneumoniae
MTMQKMQKMISRIFFVMALCFSLVWGAHAVQAQEDHTLVLQLENYQEVVSQLPSRDGHRLQVWKLDDSYSYDDRVQIVRDLHSWDENKLSSFKKTSFEMTFLENQIEVSHIPNGLYYVRSIIQTDAVSYPAEFLFEMTDQTVEPLVIVAKKTDTMTTKVKLIKVDQDHNRLEGVGFKLVSVARDGSEKEVPLIGEYRYSSSGQVGRTLYTDKNGEIFVTNLPLGNYRFKEVEPLAGYAVTTLDTDVQLVDHQLVTITVVNQKLPRGNVDFMKVDGRTNTSLQGAMFKVMKEESGHYTPVLQNGKEVVVTSGKDGRFRVEGLEYGTYYLWELQAPTGYVQLTSPVSFTIGKDTRKELVTVVKNNKRPRIDVPDTGEETLYILMLVAILLFGSGYYLTKKPNN

SEQ ID NO: 176 - protein, 304 aa, Streptococcus pneumoniae
MLIKMVKTKKQKRNNLLLGVVFFIGMAVMAYPLVSRLYYRVESNQQIADFDKEKATLDEADIDERMKLAQAFNDSLNNVVSGDPWSEEMKKKGRAEYARMLEIHERMGHVEIPVIDVDLPVYAGTAEEVLQQGAGHLEGTSLPIGGNSTHAVITAHTGLPTAKMFTDLTKLKVGDKFYVHNIKEVMAYQVDQVKVIEPTNFDDLLIVPGHDYVTLLTCTPYMINTHRLLVRGHRIPYVAEVEEEFIAANKLSHLYRYLFYVAVGLIVILLWIIRRLRKKKKQPEKALKALKAARKEVKVEDGQQ

SEQ ID NO: 177 - protein, 261 aa, Streptococcus pneumoniae
VSRYYYRIESNEVIKEFDETVSQMDKAELEERWRLAQAFNATLKPSEILDPFTEQEKKKGVSEYANMLKVHERIGYVEIPAIDQEIPMYVGTSEEILQKGAGLLEGASLPVGGENTHTVVTAHRGLPTAELFSQLDKMKKGDVFYLHVLDQVLAYQVDQILTVEPNDFEPVLIQHGEDYATLLTCTPYMINSHRLLVRGKRIPYTAPIAERNRAVRERGQFWLWLLLAALVMILVLSYGVYRHRRIVKGLEKQLEEHHVKG

SEQ ID NO: 178 - protein, 283 aa, Streptococcus pneumoniae
MSKAKLQKLLGYLLMLVALVIPVYCFGQMVLQSLGQVKGHEIFSESVTADSYQEQLQRSLDYNQRLDSQNRIVDPFLAEGYEVNYQVSDDPDAVYGYLSIPSLEIMEPVYLGADYHHLAMGLAHVDGTPLPVEGKGIRSVIAGHRAEPSHVFFRHLDQLKVGDALYYDNGQEIVEYQMMDTEIILPSEWEKLESVSSKNIMTLITCDPIPTFNKRLLVNFERVAVYQKSDPQTAAVARVAFTKEGQSVSRVATSQWLYRGLVVLAFLGILFVLWKLARLLRGK

SEQ ID NO: 179 - DNA, 869 bp, Streptococcus pyogenes
gctacaacagttcacggggagactgttgtaaacggagccaaactaacagttacaaaaaaccttgatttagttaatagcaatgcattaattccaaatacagattttacatttaaaatcgaacctgatactactgtcaacgaagacggaaataagtttaaaggtgtagctttgaacacaccgatgactaaagtcacttacaccaattcagataaaggtggatcaaatacgaaaactgcagaatttgatttttcagaagttacttttgaaaaaccaggtgtttattattacaaagtaactgaggagaagatagataaagttcctggtgtttcttatgatacaacatcttacactgttcaagttcatgtcttgtggaatgaagagcaacaaaaaccagtagctacttatattgttggttataaagaaggtagtaaggtgccaattcagttcaaaaatagcttagattctactacattaacggtgaagaaaaaagtttcaggtaccggtggagatcgctctaaagattttaattttggtctgactttaaaagcaaatcagtattataaggcgtcagaaaaagtcatgattgagaagacaactaaaggtggtcaagctcctgttcaaacagaggctagtatagatcaactctatcattttaccttgaaagatggtgaatcaatcaaagtcacaaatcttccagtaggtgtggattatgttgtcactgaagacgattacaaatcagaaaaatatacaaccaacgtggaagttagtcctcaagatggagctgtaaaaaatatcgcaggtaattcaactgaacaagagacatctactgataaagatatgaccattacttttacaaataaaaaagattt

SEQ ID NO: 180 - protein, 5 aa, Streptococcus pyogenes
LPATG

SEQ ID NO: 181 - protein, 5 aa, Streptococcus pyogenes
LPATG

SEQ ID NO: 182 - protein, 5 aa, Streptococcus pyogenes
VVPTG

SEQ ID NO: 183 - protein, 5 aa, Streptococcus pyogenes
EVPTG

SEQ ID NO: 184 - protein, 5 aa, Streptococcus pyogenes
VPPTG

SEQ ID NO: 185 - protein, 5 aa, Streptococcus pyogenes
LPLAG

SEQ ID NO: 186 - protein, 5 aa, Streptococcus pneumoniae
  VARIANT 3: Xaa = Any Amino Acid
YPXTG

SEQ ID NO: 187 - protein, 509 aa, Streptococcus pneumoniae; identical to SEQ ID NO: 87

SEQ ID NO: 188 - protein, 883 aa, Streptococcus pneumoniae
MKKVRKIFQKAVAGLCCISQLTAFSSIVALAETPETSPAIGKVVIKETGEGGALLGDAVFELKNNTDGTTVSQRTEAQTGEAIFSNIKPGTYTLTEAQPPVGYKPSTKQWTVEVEKNGRTTVQGEQVENREEALSDQYPQTGTYPDVQTPYQIIKVDGSEKNGQHKALNPNPYERVIPEGTLSKRIYQVNNLDDNQYGIELTVSGKTTVETKEASTPLDVVILLDNSNSMSNIRHNHAHRAEKAGEATRALVDKITSNPDNRVALVTYGSTIFDGSEATVEKGVADANGKILNDSALWTFDRTTFTAKTYNYSFLNLTSDPTDIQTIKDRIPSDAEELNKDKLMYQFGATFTQKALMTADDILTKQARPNSKKVIFHITDGVPTMSYPINFKYTGTTQSYRTQLNNFKAKTPNSSGILLEDFVTWSADGEHKIVRGDGESYQMFTKKPVTDQYGVHQILSITSMEQRAKLVSAGYRFYGTDLYLYWRDSILAYPFNSSTDWITNHGDPTTWYYNGNMAQDGYDVFTVGVGVNGDPGTDEATATRFMQSISSSPDNYTNVADPSQILQELNRYFYTIVNEKKSIENGTITDPMGELIDFQLGADGRFDPADYTLTANDGSSLVNNVPTGGPQNDGGLLKNAKVFYDTTEKRIRVTGLYLGTGEKVTLTYNVRLNDQFVSNKFYDTNGRTTLHPKEVEKNTVRDFPIPKIRDVRKYPEITIPKEKKLGEIEFIKINKNDKKPLRDAVFSLQKQHPDYPDIYGAIDQNGTYQNVRTGEDGKLTFKNLSDGKYRLFENSEPAGYKPVQNKPIVAFQIVNGEVRDVTSIVPQDIPAGYEFTNDKHYITNEPIPPKREYPRTGGIGMLPFYLIGCMMMGGVLLYTRKNP

SEQ ID NO: 189 - protein, 644 aa, Streptococcus pneumoniae
  VARIANT 267: Xaa = Any Amino Acid
MKSINKFLTMLAALLLTASSLFSAATVFAADNVSTAPDAVTKTLTIHKLLLSEDDLKTWDTNGPKGYDGTQSSLKDLTGVVAEEIPNVYFELQKYNLTDGKEKENLKDDSKWTTVHGGLTTKDGLKIETSTLKGVYRIREDRTKTTYVGPNGQVLTGSKAVPALVTLPLVNNNGTVIDAHVFPKNSYNKPVVDKRIADTLNYNDQNGLSIGTKIPYVVNTTIPSNATFATSFWSDEMTEGLTYNEDVTITLNNVAMDQADYEVTKGXNGFNLKLTEAGLAKINGKDADQKIQITYSATLNSLAVADIPESNDITYHYGNHQDHGNTPKPTKPNNGQITVTKTWDSQPAPEGVKATVQLVNAKTGEKVGAPVELSENNWTYTWSGLDNSIEYKVEEEYNGYSAEYTVESKGKLGVKNWKDNNPAPINPEEPRVKTYGKKFVKVDQKDTRLENAQFVVKKADSNKYIAFKSTAQQAADEKAAATAKQKLDAAVAAYTNAADKQAAQALVDQAQQEYNVAYKEAKFGYVEVAGKDEAMVLTSNTDGQFQISGLAAGTYKLEEIKAPEGFAKIDDVEFVVGAGSWNQGEFNYLKDVQKNDATKVVNKKITIPQTGGIGTIIFAVAGAAIMGIAVYAYVKNNKDEDQLA

SEQ ID NO: 190 - protein, 401 aa, Streptococcus pneumoniae; identical to SEQ ID NO: 175

SEQ ID NO: 191 - protein, 304 aa, Streptococcus pneumoniae; identical to SEQ ID NO: 176

SEQ ID NO: 192 - protein, 297 aa, Streptococcus pneumoniae
MDNSRRSRKKGTKKKKHPLILLLIFLVGFAVAIYPLVSRYYYRIESNEVIKEFDETVSQMDKAELEERWRLAQAFNATLKPSEILDPFTEQEKKKGVSEYANMLKVHERIGYVEIPAIDQEIPMYVGTSEEILQKGAGLLEGASLPVGGENTHTVVTAHRGLPTAELFSQLDKMKKGDVFYLHVLDQVLAYQVDQILTVEPNDFEPVLIQHGEDYATLLTCTPYMINSHRLLVRGKRIPYTAPIAERNRAVRERGQFWLWLLLAALVMILVLSYGVYRHRRIVKGLEKQLEEHHVKG

SEQ ID NO: 193 - protein, 283 aa, Streptococcus pneumoniae
MSKAKLQKLLGYLLMLVALVIPVYCFGQMVLQSLGQVKGHEIFSESVTADSYQEQLQRSLDYNQRLDSQNRIVDPFLAEGYEVNYQVSDDPDAVYGYLSIPSLEIMEPVYLGADYHHLAMGLAHVDGTPLPVEGKGIRSVIAGHRAEPSHVFFRHLDQLKVGDALYYDNGQEIVEYQMMDTEIILPSEWEKLESVSSKNIMTLITCDPIPTFNKRLLVNFERVAVYQKSDPQTAAVARVAFTKEGQSVSRVATSQWLYRGLVVLAFMGILFVLWKLARLLRGK

SEQ ID NO: 194 - protein, 509 aa, Streptococcus pneumoniae; identical to SEQ ID NO: 87

SEQ ID NO: 195 - protein, 883 aa, Streptococcus pneumoniae
MKKVRKIFQKAVAGLCCISQLTAFSSIVALAETPETSPAIGKVVIKETGEGGALLGDAVFELKNNTDGTTVSQRTEAQTGEAIFSNIKPGTYTLTEAQPPVGYKPSTKQWTVEVEKNGRTTVQGEQVENREEALSDQYPQTGTYPDVQTPYQIIKVDGSEKNGQHKALNPNPYERVIPEGTLSKRIYQVNNLDDNQYGIELTVSGKTTVETKEASTPLDVVILLDNSNSMSNIRHNHAHRAEKAGEATRALVDKITSNPDNRVALVTYGSTIFDGSEATVEKGVADANGKILNDSALWTFDRTTFTAKTYNYSFLNLTSDPTDIQTIKDRIPSDAEELNKDKLMYQFGATFTQKALMTADDILTKQARPNSKKVIFHITDGVPTMSYPINFKYTGTTQSYRTQLNNFKAKTPNSSGILLEDFVTWSADGEHKIVRGDGESYQMFTKKPVTDQYGVHQILSITSMEQRAKLVSAGYRFYGTDLYLYWRDSILAYPFNSSTDWITNHGDPTTWYYNGNMAQDGYDVFTVGVGVNGDPGTDEATATRFMQSISSSPDNYTNVADPSQILQELNRYFYTIVNEKKSIENGTITDPMGELIDFQLGADGRFDPADYTLTANDGSSLVNNVPTGGPQNDGGLLKNAKVFYDTTEKRIRVTGLYLGTGEKVTLTYNVRLNDQFVSNKFYDTNGRTTLHPKEVEKNTVRDFPIPKIRDVRKYPEITIPKEKKLGEIEFIKINKNDKKPLRDAVFSLQKQHPDYPDIYGAIDQNGTYQNVRTGEDGKLTFKNLSDGKYRLFENSEPAGYKPVQNKPIVAFQIVNGEVRDVTSIVPQDIPAGYEFTNDKHYITNEPIPPKREYPRTGGIGMLPFYLIGCMMMGGVLLYTRKHP

SEQ ID NO: 196 - protein, 644 aa, Streptococcus pneumoniae; identical to SEQ ID NO: 174

SEQ ID NO: 197 - protein, 401 aa, Streptococcus pneumoniae; identical to SEQ ID NO: 175

SEQ ID NO: 198 - protein, 304 aa, Streptococcus pneumoniae; identical to SEQ ID NO: 176

SEQ ID NO: 199 - protein, 297 aa, Streptococcus pneumoniae; identical to SEQ ID NO: 192

SEQ ID NO: 200 - protein, 283 aa, Streptococcus pneumoniae; identical to SEQ ID NO: 178

SEQ ID NO: 201 - protein, 509 aa, Streptococcus pneumoniae; identical to SEQ ID NO: 87

SEQ ID NO: 202 - protein, 883 aa, Streptococcus pneumoniae; identical to SEQ ID NO: 195

SEQ ID NO: 203 - protein, 644 aa, Streptococcus pneumoniae; identical to SEQ ID NO: 174

SEQ ID NO: 204 - protein, 401 aa, Streptococcus pneumoniae; identical to SEQ ID NO: 175

SEQ ID NO: 205 - protein, 304 aa, Streptococcus pneumoniae; identical to SEQ ID NO: 176

SEQ ID NO: 206 - protein, 297 aa, Streptococcus pneumoniae; identical to SEQ ID NO: 192

SEQ ID NO: 207 - protein, 283 aa, Streptococcus pneumoniae; identical to SEQ ID NO: 178

SEQ ID NO: 208 - protein, 509 aa, Streptococcus pneumoniae; identical to SEQ ID NO: 87

SEQ ID NO: 209 - protein, 886 aa, Streptococcus pneumoniae
MKKVRKIFQKAVAGLCCISQLTAFSSIVALAETPETSPAIGKVVIKETGEGGALLGDAVFELKNNTNGTTVSQRTEAQTGEAIFSNIKPGTYTLTEAQPPVGYKPSTKQRTVEVEKNGRTTVQGEQVENREEALSDQYPQTGTYPDVQTPYQIIKVDGSEKNGQHKALNPNPYERVIPEGTLSKRIYQVNNLDDNQYGIELTVSGKTVYERKDKSVPLDVVILLDNSNSMSNIRNKNARRAERAGEATRSLIDKITSDPENRVALVTYASTIFDGTEFTVEKGVADKNGKRLNDSLFWNYDQTSFTTNTKDYSYLKLTNDKNDIVELKNKVPTEAEDHDGNRLMYQFGATFTQKALMKADEILTQQARQNSQKVIFHITDGVPTMSYPINFNHATFAPSYQNQLNAFFSKSPNKDGILLSDFITQATSGEHTIVRGDGQSYQMFTDKTVYEKGAPAAFPVKPEKYSEMKAVGYAVIGDPINGGYIWLNWRESILAYPFNSNTAKITNHGDPTRWYYNGNIAPDGYDVFTVGIGINGDPGTDEATATSFMQSISSKPENYTNVTDTTKILEQLNRYFHTIVTEKKSIENGTITDPMGELIDLQLGTDGRFDPADYTLTANDGSRLENGQAVGGPQNDGGLLKNAKVFYDTTEKRIRVTGLYLGTGEKVTLTYNVRLNDQFVSNKFYDTNGRTTLHPKEVEKNTVRDFPIPKIRDVRKYPAITIAKEKKLGEIEFIKINKNDKKPLRDAVFSLQKQHPDYPDIYGAIDQNGTYQNVRTGEDGKLTFKNLSDGKYRLFENSEPAGYKPVQNKPIVAFQIVNGEVRDVTSIVPQDIPAGYEFTNDKHYITNEPIPPKREYPRTGGIGMLLFYLIGCMMMGGVLLYTRKHP

SEQ ID NO: 210 - protein, 665 aa, Streptococcus pneumoniae
MKSINKFLTMLAALLLTASSLFSAATVFAAGTTTTSVTVHKLLATDGDMDKIANELETGNYAGNKVGVLPANAKEIAGVMFVWTNTNNEIIDENGQTLGVNIDPQTFKLSGAMPATAMKKLTEAEGAKFNTANLPAAKYKIYEIHSLSTYVGEDGATLTGSKAVPIEIELPLNDVVDAHVYPKNTEAKPKIDKDFKGKANPDTPRVDKDTPVNHQVGDVVEYEIVTKIPALANYATANWSDRMTEGLAFNKGTVKVTVDDVALEAGDYALTEVATGFDLKLTDAGLAKVNDQNAEKTVKITYSATLNDKAIVEVPESNDVTFNYGNNPDHGNTPKPNKPNENGDLTLTKTWVDATGAPIPAGAEATFDLVNAQTGKVVQTVTLTTDKNTVTVNGLDKNTEYKFVERSIKGYSADYQEITTAGEIAVKNWKDENPKPLDPTEPKVVTYGKKFVKVNDKDNRLAGAEFVIANADNAGQYLARKADKVSQEEKQLVVTTKDALDRAVAAYNALTAQQQTQQEKEKVDKAQAAYNAAVIAANNAFEWVADKDNENVVKLVSDAQGRFEITGLLAGTYYLEETKQPAGYALLTSRQKFEVTATSYSATGQGIEYTAGSGKDDATKVVNKKITIPQTGGIGTIIFAVAGAVIMGIAVYAYVKNNKDEDQLA

SEQ ID NO: 211 - protein, 413 aa, Streptococcus pneumoniae
MTMQKMQKMQKMQKMQKMQKMISRIFFVMALCFSLVWGAHAVQAQEDHTLVLQLENYQEVVSQLPSRDGHRLQVWKLDDSYSYDNRVQIVRDLHSWDENKLSSFKKTSFEMTFLENQIEVSHIPNGLYYVRSIIQTDAVSYPAEFLFEMTDQTVEPLVIVAKKADTVTTKVKLIKVDQDHNRLEGVGFKLVSVARDGSEKEVPLIGEYRYSSSGQVGRTLYTDKNGEIVVTNLPLGTYRFKEVEPLAGYTVTTMDTDVQLVDHQLVTITVVNQKLPRGNVDFMKVDGRTNTSLQGAMFKVMKEENGHYTPVLQNGKEVVVASGKDGRFRVEGLEYGTYYLWELQAPTGYVQLTSPVSFTIGKDTRKELVTVVKNNKRPRIDVPDTGEETLYILMLVAILLFGSGYYLTKKTNN

SEQ ID NO: 212 - protein, 302 aa, Streptococcus pneumoniae
MLIKMAKTKKQKRNNLLLGVVFFIGIAVMAYPLVSRLYYRVESNQQIADFDKEKATLDEADIDERMKLAQAFNDSLNNVVSGDPWSEEMKKKGRAEYARMLEIHERMGHVEIPAIDVDLPVYAGTAEEVLQQGAGHLEGTSLPIGGNSTHAVITAHTGLPTAKMFTDLTKLKVGDKFYVHNIKEVMAYQVDQVKVIEPTNFDDLLIVPGHDYVTLLTCTPYMINTHRLLVRGHRIPYVAEVEEEFIAANKLSHLYRYLFYVAVGLIVILLWIIRRLRKKKRQSERALKALKEATKEVKVEDE

SEQ ID NO: 213 - protein, 297 aa, Streptococcus pneumoniae
MSKSRYSRKKSVKKKKNPFILLLIFLVGLAVAMYPLVSRYYYRIESNEVIKEFDETVSQMDKAELEERWRLAQAFNATLKPSEILDPFTEQEKKKGVSEYANMLKVHERIGYVEIPAIDQEIPMYVGTSEEILQKGAGLLEGASLPVGGENTHTVVTAHRGLPTAELFSQLDKMKKGDIFYLHVLDQVLAYQVDQIVTVEPNDFEPVLIQHGEDYATLLTCTPYMINSHRLLVRGKRIPYTAPIAERNRAVRERGQFWLWLLLGAMAVILLLLYRVYRNRRIVKGLEKQLEGRHVKD

SEQ ID NO: 214 - protein, 283 aa, Streptococcus pneumoniae; identical to SEQ ID NO: 80

SEQ ID NO: 215 - protein, 509 aa, Streptococcus pneumoniae; identical to SEQ ID NO: 87

SEQ ID NO: 216 - protein, 883 aa, Streptococcus pneumoniae; identical to SEQ ID NO: 195

SEQ ID NO: 217 - protein, 644 aa, Streptococcus pneumoniae; identical to SEQ ID NO: 174

SEQ ID NO: 218 - protein, 401 aa, Streptococcus pneumoniae; identical to SEQ ID NO: 175

SEQ ID NO: 219 - protein, 304 aa, Streptococcus pneumoniae; identical to SEQ ID NO: 176

SEQ ID NO: 220 - protein, 297 aa, Streptococcus pneumoniae; identical to SEQ ID NO: 192

SEQ ID NO: 221 - protein, 283 aa, Streptococcus pneumoniae; identical to SEQ ID NO: 178

SEQ ID NO: 222 - protein, 509 aa, Streptococcus pneumoniae; identical to SEQ ID NO: 87

SEQ ID NO: 223 - protein, 886 aa, Streptococcus pneumoniae
MKKVRKIFQKAVAGLCCISQLTAFSSIVALAETPETSPAIGKVVIKETGEGGALLGDAVFELKNNTDGTTVSQRTEAQTGEAIFSNIKPGTYTLTEAQPPVGYKPSTKQWTVEVEKNGRTTVQGEQVENREEALSDQYPQTGTYPDVQTPYQIIKVDGSEKNGQHKALNPNPYERVIPEGTLSKRIYQVNNLDDNQYGIELTVSGKTVYERKDKSVPLDVVILLDNSNSMSNIRNKNARRAERAGEATRSLIDKITSDPENRVALVTYASTIFDGTEFTVEKGVADKNGKRLNDSLFWNYDQTSFTTNTKDYSYLKLTNDKNDIVELKNKVPTEAEDHDGNRLMYQFGATFTQKALMKADEILTQQARQNSQKVIFHITDGVPTMSYPINFNHATFAPSYQNQLNAFFSKSPNKDGILLSDFITQATSGEHTIVRGDGQSYQMFTDKTVYEKGAPAAFPVKPEKYSEMKAVGYAVIGDPINGGYIWLNWRESILAYPFNSNTAKITNHGAPTRWYYNGNIAPDGYDVFTVGIGINGDPGTDEATATSFMQSISSKPENYTNVTDTTKILEQLNRYFHTIVTEKKSIENGTITDPMGELIDLQLGTDGRFDPADYTLTANDGSRLENGQAVGGPQNDGGLLKNAKVFYDTTEKRIRVTGLYLGTGEKVTLTYNVRLNDQFVSNKFYDTNGRTTLHPKEVEKNTVRDFPIPKIRDVRKYPAITIAKEKKLGEIEFIKINKNDKKPLRDAVFSLQKQHPDYPDIYGAIDQNGTYQNVRTGEDGKLTFKNLSDGKYRLFENSEPAGYKPVQNKPIVAFQIVNGEVRDVTSIVPQDIPAGYEFTNDKHYITNEPIPPKREYPRTGGIGMLPFYLIGCMMMGGVLLYTRKHP

SEQ ID NO: 224 - protein, 665 aa, Streptococcus pneumoniae; identical to SEQ ID NO: 210

SEQ ID NO: 225 - protein, 401 aa, Streptococcus pneumoniae
MTMQKMQKMISRIFFVMALCFSLVWGAHAVQAQEDHTLVLQLENYQEVVSQLPSRDGHRLQVWKLDDSYSYDNRVQIVRDLHSWDENKLSSFKKTSFEMTFLENQIEVSHIPNGLYYVRSIIQTDAVSYPAEFLFEMTDQTVEPLVIVAKKADTVTTKVKLIKVDQDHNRLEGVGFKLVSVARDGSEKEVPLIGEYRYSSSGQVGRTLYTDKNGEIVVTNLPLGTYRFKEVEPLAGYTVTTMDTDVQLVDHQLVTITVVNQKLPRGNVDFMKVDGRTNTSLQGAMFKVMKEENGHYTPVLQNGKEVVVASGKDGRFRVEGLEYGTYYLWELQAPTGYVQLTSPVSFTIGKDTRKELVTVVKNNKRPRIDVPDTGEETLYILMLVAILLFGSGYYLTKKTNN

SEQ ID NO: 226 - protein, 302 aa, Streptococcus pneumoniae
MLIKMAKTKKQKRNNLLLGVVFFIGMAVMAYPLVSRLYYRVESNQQIADFDKEKATLDEADIDERMKLAQAFNDSLNNVVSGDPWSEEMKKKGRAEYARMLEIHERMGHVEIPAIDVDLPVYAGTAEEVLQQGAGHLEGTSLPIGGNSTHAVITAHTGLPTAKMFTDLTKLKVGDKFYVHNIKEVMAYQVDQVKVIEPTNFDDLLIVPGHDYVTLLTCTPYMINTHRLLVRGHRIPYVAEVEEEFIAANKLSHLYRYLFYVAVGLIVILLWIIRRLRKKKRQSERALKALKEATKEVKVEDE

SEQ ID NO: 227 - protein, 296 aa, Streptococcus pneumoniae
MSKSRYSRKKSVKKKKNPFILLLIFLVGLAVAMYPLVSRYYYRIESNEVIKEFDETVSQMDKAELEERWRLAQAFNATLKPSEILDPFTDQEKKQGVSEYANMLKVHERIGYVEIPAIEQEIPMYVGTSEDILQKGAGLLEGASLPVGGENTHTVITAHRGLPTAELFSQLDKMKKGDIFYLHVLDQVLAYQVDQIVTVEPNDFEPVLIQHGQDYATLLTCTPYMINSHRLLVRGKRIPYTAPIAERNRAVRERGQFWLWLLLGAMAVILLLLYRVYRNRRIVKGLEKQLEGRHVK

SEQ ID NO: 228 - protein, 283 aa, Streptococcus pneumoniae; identical to SEQ ID NO: 80

SEQ ID NO: 229 - protein, 509 aa, Streptococcus pneumoniae; identical to SEQ ID NO: 87

SEQ ID NO: 230 - protein, 886 aa, Streptococcus pneumoniae
MKKVRKIFQKAVAGLCCISQLTAFSSIVALAETPETSPAIGKVVIKETGEGGALLGDAVFELKNNTDGTTVSQRTEAQTGEAIFSNIKPGTYTLTEAQPPVGYKPSTKQWTVEVEKNGRTTVQGEQVENREEALSDQYPQTGTYPDVQTPYQIIKVDGSEKNGQHKALNPNPYERVIPEGTLSKRIYQVNNLDDNQYGIELTVSGKTVYEQKDKSVPLDVVILLDNSNSMSNIRNKNARRAERAGEATRSLIDKITSDPENRVALVTYASTIFDGTEFTVEKGVADKNGKRLNDSLFWNYDQTSFTTNTKDYSYLKLTNDKNDIVELKNKVPTEAEDHDGNRLMYQFGATFTQKALMKADEILTQQARQNSQKVIFHITDGVPTMSYPINFNHATFAPSYQNQLNAFFSKSPNKDGILLSDFITQATSGEHTIVRGDGQSYQMFTDKTVYEKGAPAAFPVKPEKYSEMKAAGYAVIGDPINGGYIWLNWRESILAYPFNSNTAKITNHGDPTRWYYNGNIAPDGYDVFTVGIGINGDPGTDEATATSFMQSISSKPENYTNVTDTTKILEQLNRYFHTIVTEKKSIENGTITDPMGELIDLQLGTDGRFDPADYTLTANDGSRLENGQAVGGPQNDGGLLKNAKVLYDTTEKRIRVTGLYLGTDEKVTLTYNVRLNDEFVSNKFYDTNGRTTLHPKEVEQNTVRDFPIPKIRDVRKYPEITISKEKKLGDIEFIKVNKNDKKPLRDAVFSLQKQHPDYPDIYGAIDQNGTYQNVRTGEDGKLTFKNLSDGKYRLFENSEPAGYKPVQNKPIVAFQIVNGEVRDVTSIVPQDIPAGYEFTNDKHYITNEPIPPKREYPRTGGIGMLPFYLIGCMMMGGVLLYTRKHP

SEQ ID NO: 231 - protein, 654 aa, Streptococcus pneumoniae
MKSINKFLTILAALLLTVSSLFSAATVFAAEQKTKTLTVHKLLMTDQELDAWNSDAITTAGYDGSQNFEQFKQLQGVPQGVTEISGVAFELQSYTGPQGKEQENLTNDAVWTAVNKGVTTETGVKFDTEVLQGTYRLVEVRKESTYVGPNGKVLTGMKAVPALITLPLVNQNGVVENAHVYPKNSEDKPTATKTFDTAAGFVDPGEKGLAIGTKVPYIVTTTIPKNSTLATAFWSDEMTEGLDYNGDVVVNYNGQPLDNSHYTLEAGHNGFILKLNEKGLEAINGKDAEATITLKYTATLNALAVADVPEANDVTFHYGNNPGHGNTPKPNKPKNGELTITKTWADAKDAPIAGVEVTFDLVNAQTGEVVKVPGHETGIVLNQTNNWTFTATGLDNNTEYKFVERTIKGYSADYQTITETGKIAVKNWKDENPEPINPEEPRVKTYGKKFVKVDQKDERLKEAQFVVKNEQGKYLALKSAAQQAVNEKAAAEAKQALDAAIAAYTNAADKNAAQAVVDAAQKTYNDNYRAARFGYVEVERKEDALVLTSNTDGQFQISGLAAGSYTLEETKAPEGFAKLGDVKFEVGAGSWNQGDFNYLKDVQKNDATKVVNKKITIPQTGGIGTIIFAVAGAVIMGIAVYAYVKNNKDEDQLA

SEQ ID NO: 232 - protein, 401 aa, Streptococcus pneumoniae; identical to SEQ ID NO: 225

SEQ ID NO: 233 - protein, 304 aa, Streptococcus pneumoniae
MLIKMVKTKKQKRNNLLLGVVFFIGMAVMAYPLVSRLYYRVESNQQIADFDKEKATLDEADIDERMKLAQAFNDSLNNVVSGDPWSEEMKKKGRAEYARMLEIHERMGHVEIPVIDVDLPVYAGTAEEVLQQGAGQLEGTSLPIGGNSTHAVITAHTGLPTAKMFTDLTKLKVGDKFYVHNIKEVMAYQVDQVKVIEPTNFDDLLIVPGHDYVTLLTCTPYMINTHRLLVRGHRIPYVAEVEEEFIAANKLSHLYRYLFYVAVGLIVILLWIIRRLRKKKKQPEKALKALKAARKEVKVEDGQQ

SEQ ID NO: 234 - protein, 297 aa, Streptococcus pneumoniae
MDNSRRSRKKGTKKKKHPLILLLIFLVGFAVAIYPLVSRYYYRIESNEVIKEFDETVSQMDKAELEERWRLAQAFNATLKPSEILDPFTEQEKKKGVSEYANMLKVHERIGYVEIPAIDQEIPMYVGTSEEILQKGAGLLEGASLPVGGENTHTVVTAHRGLPTAELFSQLDKMKKGDVFYLHVLDQVLAYQVDQILTVEPNDFEPVLIQHGKDYATLLTCTPYMINSHRLLVRGKRIPYTAPIAERNRAVRERGQFWLWLLLAALVMILVLSYGVYRHRRIVKGLEKQLEEHHVKG

SEQ ID NO: 235 - protein, 283 aa, Streptococcus pneumoniae; identical to SEQ ID NO: 178

SEQ ID NO: 236 - protein, 509 aa, Streptococcus pneumoniae; identical to SEQ ID NO: 87

SEQ ID NO: 237 - protein, 883 aa, Streptococcus pneumoniae; identical to SEQ ID NO: 188

SEQ ID NO: 238 - protein, 644 aa, Streptococcus pneumoniae
MKSINKFLTMLAALLLTASSLFSAATVFAADNVSTAPDAVTKTLTIHKLLLSEDDLKTWDTNGPKGYDGTQSSLKDLTGVVAEEIPNVYFELQKYNLTDGKEKENLKDDSKWTTVHGGLTTKDGLKIETSTLKGVYRIREDRTKTTYVGPNGQVLTGSKAVPALVTLPLVNNNGTVIDAHVFPKNSYNKPVVDKRIADTLNYNDQNGLSIGTKIPYVVNTTIPSNATFATSFWSDEMTEGLTYNEDVTITLNNVAMDQADYEVTKGINGFNLKLTEAGLAKINGKDADQKIQITYSATLNSLAVADIPESNDITYHYGNHQDHGNTPKPTKPNNGQITVTKTWDSQPAPEGVKATVQLVNAKTGEKVGAPVELSENNWTYTWSGLDNSIEYKVEEEYNGYSAEYTVESKGKLGVKNWKDNNPAPINLEEPRVKTYGKKFVKVDQKDTRLENAQFVVKKADSNKYIAFKSTAQQAADEKAAATAKQKLDAAVAAYTNAADKQAAQALVDQAQQEYNVAYKEAKFGYVEVAGKDEAMVLTSNTDGQFQISGLAAGTYKLEEIKAPEGFAKIDDVEFVVGAGSWNQGEFNYLKDVQKNDATKVVNKKITIPQTGGIGTIIFAVAGAVIMGIAVYAYVKNNKDEDQLA

SEQ ID NO: 239 - protein, 401 aa, Streptococcus pneumoniae
MTMQKMQKMISRIFFVMALCFSLVWGAHAVQAQEDHTLVLQLENYQEVVSQLPSRDGHRLQVWKLDDSYSYDNRVQIVRDLHSWDENKLSSFKKTSFEMTFLENQIEVSHIPNGLYYVRSIIQTDAVSYPAEFLFEMTDQTVEPLVIVAKKADTVTTKVKLIKVDQDHNRLEGVGFKLVSVARDGSEKEVPLIGEYRYSSSGQVGRTLYTDKNGEIVVTNLPLGTYRFKEVEPLAGYAVTTMDTDVQLVDHQLVTITVVNQKLPRGNVDFMKVDGRTNTSLQGAMFKVMKEENGHYTPVLQNGKEVVVASGKDGRFRVEGLEYGTYYLWELQAPTGYVQLTSPVSFTIGKDTRKELVTVVKNNKRPRIDVPDTGEETLYILMLVAILLFGSGYYLTKKTNN

SEQ ID NO: 240 - protein, 302 aa, Streptococcus pneumoniae; identical to SEQ ID NO: 212

SEQ ID NO: 241 - protein, 297 aa, Streptococcus pneumoniae; identical to SEQ ID NO: 213

SEQ ID NO: 242 - protein, 283 aa, Streptococcus pneumoniae; identical to SEQ ID NO: 80

SEQ ID NO: 243 - protein, 511 aa, Streptococcus pyogenes
MPYVKKKKDSFLVETYLEQSIRDKSELVLLLFKSPTIIFSHVAKQTGLTAVQLKYYCKELDDFFGNNLDITIKKGKIICCFVKPVKEFYLHQLYDTSTILKLLVFFIKNGTSSQPLIKFSKKYFLSSSSAYRLRESLIKLLREFGLRVSKNTIVGEEYRIRYLIAMLYSKFGIVIYPLDHLDNQIIYRFLSQSATNLRTSPWLEEPFSFYNMLLALSWKRHQFAVSIPQTRIFRQLKKLFIYDCLTRSSRQVIENAFSLTFSQGDLDYLFLIYITTNNSFASLQWTPQHIETCCHIFEKNDTFRLLLEPILKRLPQLNHSKQDLIKALMYFSKSFLFNLQHFVIEIPSFSLPTYTGNSNLYKALKNIVNQWLAQLPGKRHLNEKHLQLFCSHIEQILKNKQPALTVVLISSNFINAKLLTDTIPRYFSDKGIHFYSFYLLRDDIYQIPSLKPDLVITHSRLIPFVKNDLVKGVTVAEFSFDNPDYSIASIQNLIYQLKDKKYQDFLNEQLQ

SEQ ID NO: 244 - protein, 744 aa, Streptococcus pyogenes
MQKRDKTNYGSANNKRRQTTIGLLKVFLTFVALIGIVGFSIRAFGAEEQSVPNRQSSIQDYPWYGYDSYPKGYPDYSPLKTYHNLKVNLEGSKDYQAYCFNLTKHFPSKSDSVRSQWYKKLEGTNENFIKLADKPRIEDGQLQQNILRILYNGYPNNRNGIMKGIDPLNAILVTQNAIWYYTDSAQINPDESFKTEARSNGINDQQLGLMRKALKELIDPNLGSKYSNKTPSGYRLNVFESHDKTFQNLLSAEYVPDTPPKPGEEPPAKTEKTSVIIRKYAEGDYSKLLEGATLKLSQIEGSGFQEKDFQSNSLGETVELPNGTYTLTETSSPDGYKIAEPIKFRVENKKVFIVQKDGSQVENPNKEVAEPYSVEAYNDFMDEEVLSGFTPYGKFYYAKNKDKSSQVVYCFNADLHSPPDSYDSGETINPDTSTMKEVKYTHTAGSDLFKYALRPRDTNPEDFLKHIKKVIEKGYKKKGDSYNGLTETQFRAATQLAIYYFTDSADLKTLKTYNNGKGYHGFESMDEKTLAVTKELITYAQNGSAPQLTNLDFFVPNNSKYQSLIGTEYHPDDLVDVIRMEDKKQEVIPVTHSLTVKKTVVGELGDKTKGFQFELELKDKTGQPIVNTLKTNNQDLVAKDGKYSFNLKHGDTIRIEGLPTGYSYTLKETEAKDYIVTVDNKVSQEAQSVGKDITEDKKVTFENRKDLVPPTGLTTDGAIYLWLLLLVPLGLLVWLFGRKGLKND

SEQ ID NO: 245 - protein, 173 aa, Streptococcus pyogenes
MTNYLNRLNENSLFKAFIRLVLKISIIGFLGYILFQYVFGVMIINTNDMSPALSAGDGVLYYRLADRSHINDVVVYEVDNTLKVGRIAAQAGDEVNFTQEGGLLINGHPPEKEVPYLTYPHSSGPNFPYKVPTGTYFILNDYREERLDSRYYGALPINQIKGKISTLLRVRGI

SEQ ID NO: 246 - protein, 344 aa, Streptococcus pyogenes
MKKNKLLLATAILATALGMASMSQNIKAETAGVIDGSTLVVKKTFPSYTDDNVLMPKADYSFKVEADDNAKGKTKDGLDIKPGVIDGLENTKTIRYSNSDKITAKEKSVNFEFANVKFPGVGVYRYTVAEVNGNKAGITYDSQQWTVDVYVVNKEGGGFEVKYIVSTEVGQSEKKPVLFKNSFDTTSLKIEKQVTGNTGEHQRLFSFTLLLTPNECFEKGQVVNILQGGETKKVVIGEEYSFTLKDKESVTLSQLPVGIEYKLTEEDVTKDGYKTSATLKDGEQSSTYELGKDHKTDKSADEIVVTNKRDTQVPTGVVGTLAPFAVLSIVAIGGVIYITKRKKA

SEQ ID NO: 247 - protein, 241 aa, Streptococcus pyogenes
MMMTIVQVINKAIDTLILIFCLVVLFLAGFGLWDSYHLYQQADASNFKKFKTAQQQPKFEDLLALNEDVIGWLNIPGTHIDYPLVQGKTNLEYINKAVDGSVAMSGSLFLDTRNHNDFTDDYSLIYGHHMAGNAMFGEIPKFLKKNFFNKHNKAIIETKERKKLTVTIFACLKTDAFDQLVFNPNAITNQDQQRQLVDYISKRSKQFKPVKLKHHTKFVAFSTCENFSTDNRVIVVGTIQE

SEQ ID NO: 248 - protein, 189 aa, Streptococcus pyogenes
MLFSVVMMLTMLAFNQTVLAKDSTVQTSISVENVLERAGDSTPFSIALESIDAMKTIEEITIAGSGKASFSPLTFTTVGQYTYRVYQKPSQNKDYQADTTVFDVLVYVTYDEDGTLVAKVISRRAGDEEKSAITFKPKRLVKPIPPRQPDIPKTPLPLAGEVKSLLGILSIVLLGLLVLLYVKKLKSRL

SEQ ID NO: 249 - protein, 401 aa, Streptococcus pyogenes; identical to SEQ ID NO: 119

SEQ ID NO: 250 - protein, 1160 aa, Streptococcus pyogenes
MTQKNSYKLSFLLSLTGFILGLLLVFIGLSGVSVGHAETRNGANKQGYFEIKKVDQNNKPLSGATFSLTPKDGKGKPVQTFTSSEEGIIDAQNLQPGTYTLKEETAPDGYDKTSRTWTVTVYENGYTKLVENPYNGEIISKAGSKDVSSSLQLENPKMSVVSKYGEQEKTSNSADFYRNHAAYFKMSFELKQKDKSETINPGDTFVLQLDRRLNPKGISQDIPKIIYDSENSPLAIGKYDAKTHQLTYTFTNYIAGLDKVQLSAELSLFLENKEVLENTNISDFKSTIGGQEITYKGTVNVLYGNESTKESNYITNGLSNVGGSIESYNTETGEFVWYVYVNPNRTNIPYAVLNLWGFAKRTAQGENDNSSVSSAQLTGYDIYEVPHNYRLPTSYGVDISRLNLRKDLEAKLPQGSTQGANKRLRIDFGENLQGKAFVVKVTGKADQSGKELIVQSHLSSFNNWGSYKTLRPNSHVSFTNEIALSPSKGSGSGTSEFTKPAITVANLKRVAQLRFKKVSTDNVPLPEAAFELRSSNGNSQKLEASSNTQGEIHFKDLTSGTYDLYETKAPKGYQQVTEKLATVTVDTTKPAEQMVKWEKPHSFVKVEANKEVTIVNHKETLTFSGKKIWENDRPDQRPAKIQVQLLQNGQKMPNQIQEVTKDNDWSYHFKDLPKYDAKNQEYKYSVEEVKVPDGYKVSYLGNDIFNTRETEFVFEQNNFNLEFGNAEIKGQSGSKIIDEDTLTSFKGKKIWKNDTAENRPQAIQVQLYADGVAVEGQTKFISGSGNEWSFEFKNLKKYNGTGNDIIYSVKEVTVPTGYDVTYSANDIINTKREVITQQGPNLEIEETLPLESGASGGTTTVEDSRSVDTLSGLSSEQGQSGDMTIEEDSATHIKFSKRDIDGKELAGATMELRDSSGKTISTWISDGQVKDFYLMPGKYTFVETAAPDGYEIATAITFTVNEQGQVTVNGKATKGDAHIVMVDAYKPTKGSGQVIDIEEKLPDEQGHSGSTTEIEDSKPSDVIIGGQGEVVDTTEDTQSGMTGHSGSTTEIEDSKSSDVIIGGQGQVVETTEDTQTGMHGDSGCKTEVEDTKLVQFFHFDNKEPESNSEIPKKDKPKSNTSLPATGEKQHNKFFWMVTSCSLISSVFVISLKSKKRLLSC

SEQ ID NO: 251 - DNA, 1650 bp, Streptococcus pyogenes
atgagagagaaaatattaatagcagcaaaaaaactaatgctagcttgtttagctatcttagctgtagtagggcttggaatgacaagagtatcagctttatcaaaagatgataaggcggagttgaagataacaaatatcgaaggtaaaccgaccgtgacactgtataaaattggtgatggaaaatacagtgagcgaggggattcttttattggatttgagttaaagcaaggtgtggagctaaataaggcaaaacctacatctcaagaaataaataaaatcgctaatggtattaataaaggtagtgttaaggctgaagtagttaatataaaagaacatgctagtacaacttatagttatacaacaactggtgcaggtatttacttggctatattgactggagctactgatggacgtgcctataatcctatcttactgacagcttcttacaatgaggaaaatccacttaagggagggcagattgacgcaactagtcattatctttttggagaagaagcagttgctaaatctagccaaccaacaattagcaagtcaattacaaaatccacaaaagatggtgataaagatacagcatctgtaggtgaaaaagttgattacaaattaactgttcagttaccaagttattcgaaagatgctatcaataaaacggtgtttatcactgacaaattgtctcagggacttactttccttccaaaaagtttaaagattatctggaatggtcaaacgttaacaaaggtgaatgaagaatttaaagctggagataaggtaattgctcaacttaaggttgaaaataatggatttaatctgaactttaattatgataaccttgataatcatgccccagaagttaactatagtgctctactaaatgaaaacgcagttgttggtaaaggtggtaatgacaataatgtagactattactattcaaataatccgaataaaggagagacccataaaacaactgagaagcctaaagagggtgaaggtactggtatcactaaaaagacggataaaaaaaccgtctacacctatcgtgtagcctttaagaaaacaggcaaagatcatgccccactagctggtgctgttttcggtatctattcagataaggaagcgaaacaattagtcgatattgttgtgacaaatgcacagggttatgcagcatcaagcgaagttgggaaagggacttattacattaaagaaattaaatcccctaagggttactctttaaatacaaatatttatgaagtggaaacttcatgggaaaaagctacaacgacttctacaactaatcgtttagagacaatttatacaacagatgataatcaaaagtctccaggaactaatacagttggttggttggaagatggtgtcttttacaaagaaaatccaggtggtgatgctaaacttgcctatatcaaacaatcaacagaggagacttctacaactatagaagtcaaagaaaatcaagctgaaggttcaggtacggtattattagaaactgaaattcctaacaccaaattaggtgaattaccttcgacaggtagcattggtacttacctctttaaagctattggttcggctgctatgatcggtgcaattggtatttatattgttaaacgtcgtaaagcttaa

SEQ ID NO: 252 - protein, 549 aa, Streptococcus pyogenes
MREKILIAAKKLMLACLAILAVVGLGMTRVSALSKDDKAELKITNIEGKPTVTLYKIGDGKYSERGDSFIGFELKQGVELNKAKPTSQEINKIANGINKGSVKAEVVNIKEHASTTYSYTTTGAGIYLAILTGATDGRAYNPILLTASYNEENPLKGGQIDATSHYLFGEEAVAKSSQPTISKSITKSTKDGDKDTASVGEKVDYKLTVQLPSYSKDAINKTVFITDKLSQGLTFLPKSLKIIWNGQTLTKVNEEFKAGDKVIAQLKVENNGFNLNFNYDNLDNHAPEVNYSALLNENAVVGKGGNDNNVDYYYSNNPNKGETHKTTEKPKEGEGTGITKKTDKKTVYTYRVAFKKTGKDHAPLAGAVFGIYSDKEAKQLVDIVVTNAQGYAASSEVGKGTYYIKEIKSPKGYSLNTNIYEVETSWEKATTTSTTNRLETIYTTDDNQKSPGTNTVGWLEDGVFYKENPGGDAKLAYIKQSTEETSTTIEVKENQAEGSGTVLLETEIPNTKLGELPSTGSIGTYLFKAIGSAAMIGAIGIYIVKRRKA

SEQ ID NO: 253 - DNA, 1059 bp, Streptococcus
ttggagagagaaaaaatgaaaaaaaacaaattattacttgctactgcaatcttagcaactgctttaggaacagcttctttaaatcaaaacgtaaaagctgagacggcaggggttgtaacaggaaaatcactacaagttacaaagacaatgacttatgatgatgaagaggtgttaatgcccgaaaccgcctttacttttactatagagcctgatatgactgcaagtggaaaagaaggcagcctagatattaaaaatggaattgtagaaggcttagacaaacaagtaacagtaaaatataagaatacagataaaacatctcaaaaaactaaaatagcacaatttgatttttctaaggttaaatttccagctataggtgtttaccgctatatggtttcagagaaaaacgataaaaaagacggaattacgtacgatgataaaaagtggactgtagatgtttatgttgggaataaggccaataacgaagaaggtttcgaagttctatatattgtatcaaaagaaggtacttctagtactaaaaaaccaattgaatttacaaactctattaaaactacttccttaaaaattgaaaaacaaataactggcaatgcaggagatcgtaaaaaatcattcaacttcacattaacattacaaccaagtgaatattataaaactggatcagttgtgaaaatcgaacaggatggaagtaaaaaagatgtgacgataggaacgccttacaaatttactttgggacacggtaagagtgtcatgttatcgaaattaccaattggtatcaattactatcttagtgaagacgaagcgaataaagacggctacactacaacggcaacattaaaagaacaaggcaaagaaaagagttccgatttcactttgagtactcaaaaccagaaaacagacgaatctgctgacgaaatcgttgtcacaaataagcgtgacactcaagttccaactggtgttgtagggacccttgctccatttgcagttcttagcattgtggctattggtggagttatctatattacaaaacgtaaaaaagcttaa

SEQ ID NO: 254 - protein, 352 aa, Streptococcus pyogenes; identical to SEQ ID NO: 95

SEQ ID NO: 255 - DNA, 1029 bp, Streptococcus pyogenes
  misc_feature 918, 921, 929, 939, 945, 957, 967, 977, 983, 989, 996, 999,1002, 1006, 1017, 1025: n = A,T,C or G
atgaaaaaaaataaattattacttgctactgcaatcttagcaactgctttaggaacagcttctttaaatcaaaacgtaaaagctgagacggcaggggttgttagcagtggtcaattaacaataaaaaaatcaattacaaattttaatgatgatacacttttgatgcctaagacagactatacttttagcgttaatccggatagtgcggctacaggtactgaaagtaatttaccaattaaaccaggtattgctgttaacaatcaagatattaaggtttcttattctaatactgataagacatcaggtaaagaaaaacaagttgttgttgactttatgaaagttacttttcctagcgttggtatttaccgttatgttgttaccgagaataaagggacagcagaaggagttacatatgatgatacaaaatggttagttgacgtctatgttggtaataatgaaaagggaggtcttgaaccaaagtatattgtatctaaaaaaggagattctgctactaaagaaccaatccagtttaataattcattcgaaacaacgtcattaaaaattgaaaagaaagttactggtaatacaggagatcataaaaaagcatttaactttacattaacattgcaaccaaatgaatactatgaggcaagttcggttgtgaaaattgaagagaacggacaaacgaaagatgtgaaaattggggaggcatataagtttactttgaacgatagtcagagtgtgatattgtctaaattaccagttggtattaattataaagttgaagaagcagaagctaatcaaggtggatatactacaacagcaactttaaaagatggagaaaagttatctacttataacttaggtcaggaacataaaacagacaagactgctgatgaaatcgttgtcacaaataancgngacactcnagttccaacnggtgtngtaggcaccccncctccattcncagttcttancattgnggctantggtggngtnatntatnttacaaaacgnaaaaaagnataa

SEQ ID NO: 256 - protein, 342 aa, Streptococcus pyogenes
  VARIANT 306, 310, 323, 326, 328, 330, 334, 336, 342: Xaa = Any Amino Acid
MKKNKLLLATAILATALGTASLNQNVKAETAGVVSSGQLTIKKSITNFNDDTLLMPKTDYTFSVNPDSAATGTESNLPIKPGIAVNNQDIKVSYSNTDKTSGKEKQVVVDFMKVTFPSVGIYRYVVTENKGTAEGVTYDDTKWLVDVYVGNNEKGGLEPKYIVSKKGDSATKEPIQFNNSFETTSLKIEKKVTGNTGDHKKAFNFTLTLQPNEYYEASSVVKIEENGQTKDVKIGEAYKFTLNDSQSVILSKLPVGINYKVEEAEANQGGYTTTATLKDGEKLSTYNLGQEHKTDKTADEIVVTNXRDTXVPTGVVGTPPPFXVLXIXAXGGVXYXTKRKKX

SEQ ID NO: 257 - DNA, 803 bp, Streptococcus pyogenes
agcagtggtcaattaacaataaaaaaatcaattacaaattttaatgatgatacacttttgatgcctaagacagactatacttttagcgttaatccggatagtgcggctacaggtactgaaagtaatttaccaattaaaccaggtattgctgttaacaatcaagatattaaggtttcttattctaatactgataagacatcaggtaaagaaaaacaagttgttgttgactttatgaaagttacttttcctagcgttggtatttaccgttatgttgttaccgagaataaagggacagcagaaggagttacatatgatgatacaaaatggttagttgacgtctatgttggtaataatgaaaagggaggtcttgaaccaaagtatattgtatctaaaaaaggagattctgctactaaagaaccaatccagtttaataattcattcgaaacaacgtcattaaaaattgaaaaggaagttactggtaatacaggagatcataaaaaagcatttaactttacattaacattgcaaccaaatgaatactatgaggcaagttcggttgtgaaaattgaagagaacggacaaacgaaagatgtgaaaattggggaggcatataagtttactttgaacgatagtcagagtgtgatattgtctaaattaccagttggtattaattataaagttgaagaagcagaagctaatcaaggtggatatactacaacagcaactttaaaagatggagaaaagttatctacttataacttaggtcaggaacataaaacagacaagactgctgatgaaatcgt

SEQ ID NO: 258 - protein, 268 aa, Streptococcus pyogenes
SSGQLTIKKSITNFNDDTLLMPKTDYTFSVNPDSAATGTESNLPIKPGIAVNNQDIKVSYSNTDKTSGKEKQVVVDFMKVTFPSVGIYRYVVTENKGTAEGVTYDDTKWLVDVYVGNNEKGGLEPKYIVSKKGDSATKEPIQFNNSFETTSLKIEKEVTGNTGDHKKAFNFTLTLQPNEYYEASSVVKIEENGQTKDVKIGEAYKFTLNDSQSVILSKLPVGINYKVEEAEANQGGYTTTATLKDGEKLSTYNLGQEHKTDKTADEIV

SEQ ID NO: 259 - DNA, 803 bp, Streptococcus pyogenes; identical to SEQ ID NO: 257

SEQ ID NO: 260 - protein, 268 aa, Streptococcus pyogenes; identical to SEQ ID NO: 258

SEQ ID NO: 261 - DNA, 843 bp, Streptococcus pyogenes
gagacggcaggggttgttagcagtggtcaattaacaataaaaaaatcaattacaaattttaatgatgatacacttttgatgcctaagacagactatacttttagcgttaatccggatagtgcggctacaggtactgaaagtaatttaccaattaaaccaggtattgctgttaacaatcaagatattaaggtttcttattctaatactgataagacatcaggtaaagaaaaacaagttgttgttgactttatgaaagttacttttcctagcgttggtatttaccgttatgttgttaccgagaataaagggacagcagaaggagttacatatgatgatacaaaatggttagttgacgtctatgttggtaataatgaaaagggaggtcttgaaccaaagtatattgtatctaaaaaaggagattctgctactaaagaaccaatccagtttaataattcattcgaaacaacgtcattaaaaattgaaaaggaagttactggtaatacaggagatcataaaaaagcatttaactttacattaacattgcaaccaaatgaatactatgaggcaagttcggttgtgaaaattgaagagaacggacaaacgaaagatgtgaaaattggggaggcatataagtttactttgaacgatagtcagagtgtgatattgtctaaattaccagttggtattaattataaagttgaagaagcagaagctaatcaaggtggatatactacaacagcaactttaaaagatggagaaaagttatctacttataacttaggtcaggaacataaaacagacaagactgctgatgaaatcgttgtcacaaataaccgtgacact

SEQ ID NO: 262 - protein, 281 aa, Streptococcus pyogenes
ETAGVVSSGQLTIKKSITNFNDDTLLMPKTDYTFSVNPDSAATGTESNLPIKPGIAVNNQDIKVSYSNTDKTSGKEKQVVVDFMKVTFPSVGIYRYVVTENKGTAEGVTYDDTKWLVDVYVGNNEKGGLEPKYIVSKKGDSATKEPIQFNNSFETTSLKIEKEVTGNTGDHKKAFNFTLTLQPNEYYEASSVVKIEENGQTKDVKIGEAYKFTLNDSQSVILSKLPVGINYKVEEAEANQGGYTTTATLKDGEKLSTYNLGQEHKTDKTADEIVVTNNRDT

SEQ ID NO: 263 - DNA, 900 bp, Streptococcus pyogenes
gagacggcaggagtgtccgaaaatgcaaaattaatagtaaaaaagacatttgactcttatacagacaatgaagttttaatgccaaaagctgattatacttttaaagtagaggcagatagtacagctagtggcaaaacgaaagacggtttagagattaagccaggtattgttaatggtttaacagaacagattatcagctatactaatactgataaaccagatagtaaagttaaaagtacagagtttgatttttcaaaagtagtattccctggtattggtgtttaccgctatactgtttcagaaaaacaaggtgatgttgaaggaattacctacgatactaagaagtggacagtagatgtttatgttggaaacaaagaaggtggtggttttgaacctaagtttattgtatctaaggaacaaggaacagacgtcaaaaaaccagttaattttaacaactcgtttgcaactacttcgttaaaagttaagaagaatgtatcggggaatactggagaattgcaaaaagaatttgactttacattgacgcttaatgaaagcacgaattttaaaaaagatcaaattgtttctttacaaaaaggaaacgagaaatttgaagttaagattggtactccctacaagtttaaactcaaaaatggggaatctattcaactagacaagttaccagttggtattacttataaagtcaatgaaatggaagctaataaagatgggtataaaacaacagcatccttgaaagagggagatggtcaatctaaaatgtatcaattggatatggaacaaaaaacagacgaatctgctgacgaaatcgttgtcacaaataagcgtgacactcaagttccaactggtgttgtaggcacccttgctccatttgcagttcttagc

SEQ ID NO: 264 - protein, 300 aa, Streptococcus pyogenes
ETAGVSENAKLIVKKTFDSYTDNEVLMPKADYTFKVEADSTASGKTKDGLEIKPGIVNGLTEQIISYTNTDKPDSKVKSTEFDFSKVVFPGIGVYRYTVSEKQGDVEGITYDTKKWTVDVYVGNKEGGGFEPKFIVSKEQGTDVKKPVNFNNSFATTSLKVKKNVSGNTGELQKEFDFTLTLNESTNFKKDQIVSLQKGNEKFEVKIGTPYKFKLKNGESIQLDKLPVGITYKVNEMEANKDGYKTTASLKEGDGQSKMYQLDMEQKTDESADEIVVTNKRDTQVPTGVVGTLAPFAVLS

SEQ ID NO: 265 - DNA, 864 bp, Streptococcus pyogenes
gagacggcaggggttgtaacaggaaaatcactacaagttacaaagacaatgacttatgatgatgaagaggtgttaatgcccgaaaccgcctttacttttactatagagcctgatatgactgcaagtggaaaagaaggcgacctagatattaaaaatggaattgtagaaggcttagacaaacaagtaacagtaaaatataagaatacagataaaacatctcaaaaaactaaaatagcacaatttgatttttctaaggttaaatttccagctataggtgtttaccgctatatggtttcagagaaaaacgataaaaaagacggaattaggtacgatgataaaaagtggactgtagatgtttatgttgggaataaggccaataacgaagaaggtttcgaagttctatatattgtatcaaaagaaggtacttctagtactaaaaaaccaattgaatttacaaactctattaaaactacttccttaaaaattgaaaaacaaataactggcaatgcaggagatcgtaaaaaatcattcaacttcacattaacattacaaccaagtgaatattataaaaccggatcagttgtgaaaatcgaacaggatggaagtaaaaaagatgtgacgataggaacgccttacaaatttactttgggacacggtaagagtgtcatgttatcgaaattaccaattggtatcaattactatcttagtgaagacgaagcgaataaagacggttacactacaacggcaacattaaaagaacaaggcaaagaaaagagttccgatttcactttgagtactcaaaaccagaaaacagacgaatctgctgacgaaatcgttgtcacaaataagcgtgacactctcgag

SEQ ID NO: 266 - protein, 288 aa, Streptococcus pyogenes
ETAGVVTGKSLQVTKTMTYDDEEVLMPETAFTFTIEPDMTASGKEGDLDIKNGIVEGLDKQVTVKYKNTDKTSQKTKIAQFDFSKVKFPAIGVYRYMVSEKNDKKDGIRYDDKKWTVDVYVGNKANNEEGFEVLYIVSKEGTSSTKKPIEFTNSIKTTSLKIEKQITGNAGDRKKSFNFTLTLQPSEYYKTGSVVKIEQDGSKKDVTIGTPYKFTLGHGKSVMLSKLPIGINYYLSEDEANKDGYTTTATLKEQGKEKSSDFTLSTQNQKTDESADEIVVTNKRDTLE

SEQ ID NO: 267 - DNA, 1446 bp, Streptococcus pyogenes; identical to SEQ ID NO: 46

SEQ ID NO: 268 - protein, 482 aa, Streptococcus pyogenes; identical to SEQ ID NO: 47

SEQ ID NO: 269 - DNA, 799 bp, Streptococcus pyogenes
gaatggaaaggtaagatggctaatattactgaagatggttcagtaatggtagaaaatacaaaaatcggaatagctaaggaggttaataacggttttaatttaagttttatttatgatagtttagaatctatatcaccaaatataagttataaagctgttgtaaacaataaagctattgttggtgaagagggtaatcctaataaagctgaattcttctattcaaataatccaacaaaaggtaatacatacgataatttagataagaagcctgataaagggaatggtattacatccaaagaagattctaaaattgtttatacttatcaaatagcgtttagaaaagttgatagtgttagtaagaccccacttattggtgcaatttttggagtttatgatactagtaataaattaattgatattgttacaaccaataaaaatggatatgctatttcaacacaagtatcttcaggaaaatataaaattaaggaattaaaagctcctaaaggttattcattgaatacagaaacttatgaaattacggcaaattgggtaactgctacagtcaagacaagtgctaattcaaaaagtactacttatacatctgataaaaataaggcgacagataattcagagcaagtaggatggttaaaaaatggtatattctattctatagatagtagacctacaggaaatgatgttaaagaggcttatattgaatctactaaggctttaactgatggaacaactttctcaaaatcgaatgaaggttcaggtacagtattattagaaactgacatcc

SEQ ID NO: 270 - protein, 266 aa, Streptococcus pyogenes
EWKGKMANITEDGSVMVENTKIGIAKEVNNGFNLSFIYDSLESISPNISYKAVVNNKAIVGEEGNPNKAEFFYSNNPTKGNTYDNLDKKPDKGNGITSKEDSKIVYTYQIAFRKVDSVSKTPLIGAIFGVYDTSNKLIDIVTTNKNGYAISTQVSSGKYKIKELKAPKGYSLNTETYEITANWVTATVKTSANSKSTTYTSDKNKATDNSEQVGWLKNGIFYSIDSRPTGNDVKEAYIESTKALTDGTTFSKSNEGSGTVLLETDI

SEQ ID NO: 271 - DNA, 643 bp, Streptococcus pyogenes
  misc_feature 165, 250, 360, 369, 498, 549, 559: n = A,T,C or G
gtaacagtaaaatataagaatacagataaaacatctcaaaaaactaaaatagcacaatttgatttttctaaggttaaatttccagctataggtgtttaccgctatatggtttcagagaaaaacgataaaaaagacggaattacgtacgatgataaaaagtggacngtagatgtttatgttgggaataaggccaataacgaagaaggtttcgaagttctatatattgtatcaaaagaaggtacttctagtnctaaaaaaccaattgaatttacaaactctattaaaactacttccttaaaaattgaaaaacaaataactggcaatgcaggagatcgtaaaaaatcattcaacttcacattnacattacanccaagtgaatattataaaactggatcagttgtgaaaatcgaacaggatggaagtaaaaaagatgtgacgataggaacgccttacaaatttactttgggacacggtaagagtgtcatgttatcgaaattnccaattggtatcaattactatcttagtgaagacgaagcgaataaagacggntacactacancggcaacattaaaagaacaaggcaaagaaaagagttccgatttcactttgagtactcaaaaccagaaaacagacgaatctgctg

SEQ ID NO: 272 - protein, 214 aa, Streptococcus pyogenes
  VARIANT 84, 120, 123, 166, 187: Xaa = Any Amino Acid
VTVKYKNTDKTSQKTKIAQFDFSKVKFPAIGVYRYMVSEKNDKKDGITYDDKKWTVDVYVGNKANNEEGFEVLYIVSKEGTSSXKKPIEFTNSIKTTSLKIEKQITGNAGDRKKSFNFTXTLXPSEYYKTGSVVKIEQDGSKKDVTIGTPYKFTLGHGKSVMLSKXPIGINYYLSEDEANKDGYTTXATLKEQGKEKSSDFTLSTQNQKTDESA

SEQ ID NO: 273 - DNA, 381 bp, Streptococcus
ttgatagaccgccttcattatcatttctagaatttttctttaggtttgtaaagactacaaaataaaagatgaaaacaactatcttgtggatacactaaaaagacacgctaattagcaaactctctcttcatcatctctcaccattattatactactatttatatgacaaataaaggtgattttgttaaaatataactttgaaaatccacatatatttttaatcttccgtctgaaaaaataaataaaaatagtaaaaataaacacgaatttaaaataagcaaattttttaagaaaatctgtgctaaactttaatagttttgtgcttaataataatcagcacttacaagaacaaagggaaaagcgaggagagaacttttaatg

SEQ ID NO: 274 - DNA, 24 bp, Streptococcus pneumoniae
actttctaatgagttgtttaggcg

SEQ ID NO: 275 - DNA, 24 bp, Streptococcus pneumoniae
ctggtcgataactccttcaatctt

SEQ ID NO: 276 - DNA, 24 bp, Streptococcus pneumoniae
gaatgcgatattcaggaccaacta

SEQ ID NO: 277 - DNA, 24 bp, Streptococcus pneumoniae
tgtatacaagtgtgtcattgccag

SEQ ID NO: 278 - DNA, 23 bp, Streptococcus pneumoniae
gcggtctttagtcttcaaaaaca

SEQ ID NO: 279 - DNA, 25 bp, Streptococcus pneumoniae
ttgcttaagtaagagagaaaggagc

SEQ ID NO: 280 - DNA, 24 bp, Streptococcus pneumoniae
ggcaatgttgactttatgaaggtg

SEQ ID NO: 281 - DNA, 24 bp, Streptococcus pneumoniae
tgagattttctcgtttctcttagc

SEQ ID NO: 282 - DNA, 24 bp, Streptococcus pneumoniae
ccgacgaactttgatgatttattg

SEQ ID NO: 283 - DNA, 23 bp, Streptococcus pneumoniae
aatgactttgagcctgtcttgat

SEQ ID NO: 284 - DNA, 23 bp, Streptococcus pneumoniae
gccatttggatcagctaaaagtt

SEQ ID NO: 285 - DNA, 24 bp, Streptococcus pneumoniae
agcgacaagccactgtatcatatt

SEQ ID NO: 286 - DNA, 23 bp, Streptococcus pneumoniae
gtacgacaaaagtgtggcttgtt

SEQ ID NO: 287 - DNA, 24 bp, Streptococcus pneumoniae
atctcactgagttaatccgttcac

SEQ ID NO: 288 - DNA, 24 bp, Streptococcus pneumoniae
catcttcacctgttctcacatttt

SEQ ID NO: 289 - DNA, 24 bp, Streptococcus pneumoniae
caagagaaaaacacagagccataa

SEQ ID NO: 290 - DNA, 24 bp, Streptococcus pneumoniae
caggagtatagtgtccgctttctt

SEQ ID NO: 291 - DNA, 25 bp, Streptococcus pneumoniae
tatcagcatccctttatcttcaaac

SEQ ID NO: 292 - DNA, 25 bp, Streptococcus pneumoniae
aatagacgatgggtattgatcatgt

SEQ ID NO: 293 - DNA, 24 bp, Streptococcus pneumoniae
accaacagacgatgactgttaatc

SEQ ID NO: 294 - DNA, 24 bp, Streptococcus pneumoniae
ttctacaatttcctggccattatc

SEQ ID NO: 295 - DNA, 24 bp, Streptococcus pneumoniae
tttttcaacccactacagttgaca

SEQ ID NO: 296 - protein, 290 aa, Streptococcus pyogenes
MDKIIKSIAQSGAFRAYVLDSTETVALAQEKHNTLSSSTVALGRTLIANQILAANQKGDSKITVKVIGDSSFGHIISVADTKGHVKGYIQNTGVDIKKTATGEVLVGPFMGNGHFVTIIDYGTGNPYTSTTPLITGEIGEDFAYYLTESEQTPSAIGLNVLLDENDKVKVAGGFMVQVLPGASEEEIARYEKRLQEMPAISYLLASKNHVDALLEAIYGDEPYKRLSEEPLSFQCDCSRERFEAALMTLPKADLQAMIDEDKGAEIVCQFCGTKYQFNESDLEAIINDKA

SEQ ID NO: 297 - protein, 530 aa, Streptococcus pyogenes
MISIFSLDRIEIGEYTYQRLIWLSKCRKRGPLSLIEKYLESSIESKCQLVVLFFKTSYLPITEVAEKTGLTFLQINHYCEELNAFFPGSLSMTIQKRMISCQFTHPFKETYLYQLYASSNILQLLAFLIKNGSHSRPLTDFARSHFLSNSSAYRMREALIPLLRNFELKLSKNKIVGEEYRIRYLIALLYSKFGIKVYDLTQQDKNIIHSFLSHSSTHLKTSPWLSESFSFYDILLALSWKRHQFSVTIPQTRIFQQLKKLFVYDSLKKSSRDIIETYCQLNFSAGDLDYLYLIYITANNSFASLQWTPEHIRQCCQLFEENDTFRLLLNPIITLLPNLKEQKASLVKALMFFSKSFLFNLQHFIPETNLFVSPYYKGNQKLYTSLKLIVEEWMAKLPGKRYLNHKHFHLFCHYVEQILRNIQPPLVVVFVASNFINAHLLTDSFPRYFSDKSIDFHSYYLLQDNVYQIPDLKPDLVITHSQLIPFVHHELTKGIAVAEISFDESILSIQELMYQVKEEKFQADLTKQLT

SEQ ID NO: 298 - protein, 578 aa, Streptococcus pyogenes
MKLSKKLLYSAVVLATVAGPTVSPVAQFATSGIVVRAEDTRVPSQTQPDKTTVNIYKLQGADFSKQPEGIKNENGEPIDITKLKDTFGTAVTYLPGVKFKYYKVKNYSTSDDVLKSIKTVEQADSKTDLLDVAGAKETEATDQSGKVSIDLPSNDKVKYLFVESSNQDTVNKVVGYTAVPFILHLPVSNSNGKGYYDEVNVYPKNTTVNEPKVDKDVTKLGKDDDTYQIGDKITWFLKSTVPSNIKTLDKFGFTDTLNKGLSFIGDKTQTVTKVQFGTTVLSPDTDYTVEILDSKLTVSLTSAGIEKVSGLVASKQLITEAEKLYKAEDNTDEAAFLSVEVNAKLNADAVMGSRIENDVELDYGHESDIYKSKVPTNEVPEVHTGGARFEKVDATNQTDKLQDAEFGLYSNIEATETVKWTEELLKANEAAINAGKFKESNTTVGTPIIFKSASDGSFEIKGLRYGDDSTNTRSDGTVGTAEKTGKTTYYIKELVAPKGYVVSQDIVQFDVTYSSYYKDPTKVTLGTEAGDAAPTSVKNNKRPSIPNTGGIGTAIFVAIGAAVMAFAAKGMKRRTEEN

SEQ ID NO: 299 - protein, 307 aa, Streptococcus pyogenes
MKQTLKLMVSFLVMLGTMFGISQTVLAQGTHQLTIVHLEARDIDRPYPQLDIAPKEGTPTEGVLYQLYQLKSTEDGDLLAHWNSLTITELKKQAQQVFEATTNQQGKATFNQLPDGIYYGLAVKAGEKDRNVSAFLVDLSEDKVIYPKIIWSTGELDLLKVGVDGDTKKPLAGVVFELYEKDGMVPIRVKNGVHSQDIDAAKRLETDSSGHIRISGLIPGDYVLKEIETRSGYQIDQSETAVTIEKSKTVTVTIKNQKIPSPKVPPRGGFIPKTGEQQAMILVIIGGILIALALRLLSKHRKNQDKH

SEQ ID NO: 300 - protein, 305 aa, Streptococcus pyogenes
MRKRSKTSLATNIRIWIFRLIFLAGFLVLAFPIVSQITYYQASHANINAFKKAVAKIDQSEINRRLELAYAYNASIAGARKTGEHPVLKDPYSAEQKQAGVIEYARMLEVKEQIGHVIIPRINQDIPIYAGSAEENLQRGVGHLEGTSLPVGGESTHAVLTAHRGLPTAKLFTNLDKVTVGDRFYIEHIGGKIAYQVDQIKVISPDQLEDLYVIQGEDHITLLTCTPYMINSHRLLVRGKRIPYVKKAVQKEAETFRQKQYLTYAIWVIVGLILLSFLIWFKKTKQKKRRENEKATSQISHNNSK

SEQ ID NO: 301 - protein, 283 aa, Streptococcus pyogenes
MKKRLAKLATTIRNNKIRTLIFLLGSLILLFPIVSQVSYYLASHQNINRFEREVSKMDTSAIDRRIALAKAYNETVSRNPLVIDPFTRKQKEGLREYARMLEVHEQIGHVAVPSIGVDIPIYAGTAESVLQKGSGHLEGTSLPVGGQSTHAVLTAHRGLPTARLFTDLNKVKKGQIFYVTNIKETLAYKVVSIKVVNPTALSTVKVVKGKDYMTLLTCTPYMINSHRLLIKGERIPYDSTKAEKCKEQAIQGYHLSLVLKILLGLLIGLFIVIMMRRWMKHRQ

SEQ ID NO: 302 - protein, 890 aa, Streptococcus pyogenes
MKKKQKLWRGLSVTLLILSQIPFGILVQGETQDNNPALGKVIVKKTGENAMPLGKATFVLKNDHDKSEISHETVEGSGEAAFENIKPGNYTLTEKTAPIGYKKTDKTWKVKVADNGATTIEDIDPDKVEKRKEALNGQYPESAIYEDTKESYPLVKVEDSKVGNQYKALNPINGEDGRREITEGWLSKKIKKVNELDKNKYKIELTVEGKTIVETKELNQPLDVVLLLDNSNSMNNERAHNSQRALKAGEAVEKLIDKITSNKDNRVALVTYASTIFDGTEATVSKGVADRNGKALNDSVSWDYHKTTFTATTHNYSYLNLTNDANEVNILKSRIPKEAEHINGNRTLYQFGATFTQKALMKANEILETQSSNDRKKVIFHVTDGVPTMSYAINFNPYISTSYQNQFKSFLNKTPDRSGILQEDFIINGDDYQIVKGDGESFKLFSDRKVPVPGGTTQAAYQVPQNQLSVMSNEGYAINRGYIYLYWRDYNWVYPFDPKTKTVSATKQIKTHGEPTTLYFNGNIKPKGYDIFTVGIGVNGDPGATPLEAKEFMQSISSKTENYTNVDDTNKIYDELNKYFKTIVEEKHSIVDGNVTDPMGEMIEFQLKDGQSFTHDDYVLVGNDGSQLKNGVALGGPNSDGGILKDVTVTYDKTSQTIKINHLNLGSGQKVVLTYDVRLKENYISNKFYNTNNRTTLSPKSEKEPNTIRDFPIPKIRDVREFPVLTISNQKKMGEVEFIKVNKDKHSESLLGAKFQLQIEKDFSGYKQFVPEGSDVTTKNDGKIYFKALQDGNYKLYEISSPDGYIEVKTKPVVTFTIQNGEVTNLKQDPNANKNQIGYFEEDGKHLITNTPKRPPSVFPKTGGIGTIVYILVGCTLMIVATGSFRRNQQ

SEQ ID NO: 303 - protein, 53 aa, Streptococcus pyogenes
MISSYLSLLSVIGLAKAYNASLSGTSSQATQSVLRDSYSEEQKRQGGLNTLGC

SEQ ID NO: 304 - protein, 111 aa, Streptococcus pyogenes
MDKMRRGDRFYIEHLGGKLAYQVDSIKVITPDRLDDLYLVPGKDYVTLLTCTPYMINSHRLLVRGKRIPYKEGLEHKDQQLGHRGQLITYGFVSLGLALVLGLLWYRQRKK

SEQ ID NO: 305 - protein, 285 aa, Streptococcus pyogenes
MKQRVKQLYQFIMTNKLRSFLFVLGILVVLFPVVSQISYYHASHQQINQFEHKAAVIDRSAIERRISLAKAYNDAISRHPSLNDPFTSKEKAGLREYARMLEVNEQIGHVAIPKIGVDLPIYAGTSAAILEKGSGHLEGTSLPIGGLSTHAVLTAHRGLPTARLFTDLDKVKKGDYFYVTNLKETLAYQVDRIMVIEPSQLDAVSIEEGKDYVTLLTCTPYMINSHRLLVRGVRTPLTSRQAKKESLTAVRPYQYYRWLVYLAIAVLVILVMIVAKYYQKTNKSS

SEQ ID NO: 306 - protein, 1715 aa, Streptococcus pyogenes
MSIVTNKTLHKVLVKLAAILAILFLVLPTGLTAVTVLAEQINTENLIPVETAAGKILKESDLDFEQAISTSEEALKDSSASWIQLTYNKVNQNLAKQDLFLRLPQGMTIEGIGQDQKLDVKTISVPKDLDLDEAASTINNTNIITGFEKIGEQDYKLSFAATSKTLNLVFKVKGTSLNEKRELQLSDKQNLNQTSFTKILGLGIAKSDDRTSANDTTTRPSIQPRAATARETTGNQDISANLTTSNAQLNLEDKDKNNIYDVEAPDSFMFRATLSLLDSRYIVPGNYFELKLSDTIHYNMLNPTDINFPYLTQDGKVIAVPELVQDPPVDGLLRATGKIVRYRFTDQVQGLDSLTMTLNLGHSVNPNVVQNNDKYDFSYQIGGHIIKQSYDVQYGKPKENGNLNVHQRLTYTDSKENLKASSLIYVNPKQTPQYAGKQTLSILRNPKTYTISEQTVPNLLELNNQTSIKVYKLKDSKGVTDAVNLDKQYLEEVINPIITKSDGKIEVSFNYTQGETSAYVVAVETSLQQEGSQPVFIAQNSNLTSASTRKKVSETDATATVGSGGSASGDQTPKGTLYLNKVDTNHKHLANATFTLSGNTTAGQFLYRTLITDTKEVSFSDLPPGSYLLKETTAPSGYQQITTPWTVTVDDKGKVTVTGNEADTQKVPEEAEVVILWESTKWNYGNVQFYKDRFKELVDSVGNQNAKYTLIRYSGDTSDSAQVINQSVSSAEFNKILNSETLTASTMTNRKGMLKAYQLALQQFQASTNKRKYLLQLTNYPIYPGYREEKDFMSQSQTSFDAMKSLGVVPYLLVERDPYANRNTYLDPKAEASSFGAFYPSDNIKVVWSNNSSGLFTPPTNTNYTIQIQSIGSAIKQQIPESVLTVINRASGKFSINKIDEAKKGLAGATFTLSKRTTVAVNHQVQGAFTPVSKETTAGRTTLTFDNLKPGVYDLKETKAPNAYVLDPKTYVVVVQNSGKTTIVDEANFKEADYPMADNTSQFDYPTKDIANKPNKIVFTKIGDGGKSLSGAEFELRKGNEKVQTTTSGADGKVTFSKLLPGTYEVWETRVADSAYQLPQEAVATFEVKADGTFSEPMGRLFRKNIAQNNRYEIRNELVNKKTGNQKIKVIKKDELTDLPLPNAKFQLEASDGTIYTKTTDVKGEIVFEKLPYGQYILTEIEAPSGYVLDPTPHKINLTEVDSPETEVVAGRNATQPTVAPTARAALAAPVAEPVTGKNVSDQISIKELDITSSNEDTPRLVRPNHGENIVMRAGFTINPGSDIKAGDFFTLTLPNTIDPFGVSAPENVDFRILGPLGTLALGTYDSSTHTITYKFTDYITRYTVSSFSTISPFFIDRDRVKTNQDIDLFLKVGQVSSTSYHFTVDYNPYYGTADTNNPVNVGSMITRLNQDTGDFVNYIYVNPAGQTLEQATLTFTGRGSTRIDANTRVQLFEVTNPKLQMPPSWGIQDETLREVDPANYQLIKENGRFTINFYNDLLYGRSYIVKVSGKSDKNDPDPIHTSAILTQRYFNDYPYYTPSGRYIPYGPYTESFTFTAEVVKKSGESNADGSVVVRLSNRKNYIDFMKSNSQGTPLEATFELRKKATNDTVTVGTPVISDKTTGKFYFEGLSPGDYEVWETKAPDGYTKPVEAVATFKVTDEGEIVDKSLEDGRIINYKRPELPATGGPGIFVYLFIGSAMCLVAIFWDHSFRFTK

SEQ ID NO: 307 - protein, 221 aa, Streptococcus pyogenes
MKRYNKYLFTSLLAASMLFSSYKSVHAHDNIDEKGKVHLYWQGNYYVDNYVDYTKTLVDNNNSIEWTVTFNSAKEQWVYPDFSVFLPKGVKAPKEITYEHHYWDGTVDSKTRRNTKWHYDWESQQTNFNQEFDKFPGYTGWSPSLDKFYKLKNEGKFSHVLVDTYGRQSHTYFSHKMVWKFKTELEEDYKNKWDKLPFIAGIKQNNPLAASFPSYKGEFGE

SEQ ID NO: 308 - protein, 290 aa, Streptococcus pyogenes
MDKIIKSIAQSGAFRAYVLDSTETVALAQEKHNTLSSSTVALGRTLIANQILAANQKGDSKITVKVIGDSSFGHIISVADTKGHVKGYIQNTGVDIKKTATGEVLVGPFMGNGHFVTIIDYGTGNPYASTTPLITGEIGEDFAYYLTESEQTPSAIGLNVLLDENDKVKVAGGFMVQVLPGASEEEIARYEKRLQEMPAISHLLASKNHVDALLEAIYGDEPYKRLSEEPLSFQCDCSRERFEAALMTLPKADLQAMIDEDKGAEIVCQFCGTKYQFNESDLEALINDKA

SEQ ID NO: 309 - protein, 530 aa, Streptococcus pyogenes
MISIFSLDRIEIGEYTYQRLIWLSKCRKRGPLYLIEKYLESSIESKCQLVVLFFKTSYLPITEVAEKTGLTFLQLNHYCEELNAFFPGSLSMTIQKRMISCQFTHPFKETYLYQLYASSNVLQLLAFLIKNGSHSRPLTDFARSHFLSNSSAYRMREALIPLLRNFELKLSKNKIVGEEYRIRYLIALLYSKFGIKVYDLTQQDKNTIHSFLSHSSTHLKTSPWLSESFSFYDILLALSWKRHQFSVTIPQTRIFQQLKKLFVYDSLKKSSHDIIETYCQLNFSAGDLDYLYLIYITANNSFASLQWTPEHTRQCCQLFEENDTFRLLLNPIITLLPNLKEQKASLVKALMFFSKSFLFNLQHFIPETNLFVSPYYKGNQKLYTSLKLIVEEWMAKLPGKRYLNHKHFHLFCHYVEQILRNIQPPLVVVFVASNFINAHLLTDSFPRYFSDKSIDFHSYYLLQDNVYQIPDLKPDLVITHSQLIPFVQHELTKGIAVAEISFDESILSIQELMYQVKEEKFQADLTKQLT

SEQ ID NO: 310 - protein, 539 aa, Streptococcus pyogenes
MVSSYMFVRGEKMNNKMFLNKEAGFLAHTKRKRRFAVTLVGVFFMLLAYAGAIGFGQVAYAADEKTVPNFKSPDPDYPWYGYDAYGKGYPGYDISKYYHDLRVNLNGSQVYQVYCFNIQKIFPYNVKSVTQKWFKKVEGNSDTFGLYAMNPRVQGEELSQKLRSVMYNAYPKNANNIMDGLDTLNAIKVTQSAVWYYSDKSEFEVDKQWESELNNHEIDQEQVTLMREALRKLISSNLEETVEKKLPENYKLNIFNPQDTSIQHLLSAEFVPENPPRPGETPEYGPKTPELDGSPIPEDPKHPDDNLEPTLPPVMLDGEEVPEVPSESLEPALPPLMPELDGQEVPEVPSESLEPALPPLMPELDGQEVPEKPSIDLPIEVPRYEFNNKDQSPLAGESGETEYITEVYGNQQNPVDIDKKLPNETGFSGNMVETEDTKEPEVLMGGQSESVEFTKDTQTGMSGFSETATVVEDTRPKLVFHFDNNEPEVEENREKPTKNITPILPATGDIENVLAFLGILILSVLSIFSLLKNKQNNKV

SEQ ID NO: 311 - protein, 1367 aa, Streptococcus pyogenes
MYSRLKRELVIVINRKKKYKLIRLMVTLGLIFSQLAPPFGTLMALSGHSRSKSPVTEVKADNVSTLKTGSFKLKKFDEDGKTPIKDVTFQLTSETNPSNYKIEQITSGAGDASFANIPPGTYLLKEVAPPSGYQVMADYYRITVSPDGYTQYTYVKVGTTTSSPTTSLPSTSGGGTGGTVFRTSKTSGVVTVTDYNFTTKNKAQGNTDYTTLWATSGEFFDMSFKLKVNEGTQAGDSFTIKLSDYLSPNGIREKFISAPPLMLDKKVVATGIYDESTNSYIYTFNDLINHKQNAEITVNYTFSPEAKKVDRDWYVNTYNITNIIDGQKQDSGNFTIDYGQGQYMTGTLNSGLRLRNNITYLNRTTGEVEYTIYLNNGASPRDKDFTVKNPVTGRHFLNLEDKSASVAFTQKNITVYRVPLSQKTSKMPYSMSGETDGLESIPFDYSSKGITFTKESFHDNETNSNTAGLLIKIKAYITADNKRSADVSLSAGWTYTNLIRSRSDAKASAFELGNTSSGVANNIEPTVTIRNYKIKKGSIVFTKQDVETKMTLSGVAFRLEKKEENDWQIVEKYKDVQTGTEGKLILSDLDPGEYQLIETKPLDGYLVSSGPVVTFTITDQGTEGTVKPSDKIIPNTKPGKQKIKVIKKDEQSRVPLAGAKFQLESNKGVVLTGETDGKGEYTFTNLPFGDYILTEIAAPKGYILDKTPRSIAIGDTVDKEPEPTVVEAATPRTVRSVSPSATVSDKDVSRNILVKKVEFTTTNGQTPLQVKPNQGENLIARSEFELKKEIDIKKGDYFAVKLSDNIDPFGVSTGETTTFNITGPYGTLAVGKYDSKSRSIIYTFTDYVEKYEVSNFSTILPYFIDRYAVTRDADINISTSVGSQTNTARVRVLYTPYYGATDSYSPVNIGSMITKLDEKNGTFTNYIYINPMQQFIRNGKLTFQGGGSAIIDNETQVTLFKVNNSTDMPPSWGITDSTLRVENDILVNKKQGEISVDFENILEARNSFIMKVVGKIASSGTSVRTSATLSQKYDNTYGYYSTNGRWIPKGPYSEYYRYDTTAILHSGDSNVDGAIRISVTNRKNSVAFTKTNGLEKPLEATFELRRLNSNKTFTSVKTTKSTKDTGKFSFEGMESGSYEVWETQSPEGYLKPDKAVATFKVDKDGTIKDLTPDNGKIINYPNTAKIIFTKMLASEKEELSPATKEKSATFSLWRLKEESLKETNTVSQAYDEQYYEPVMENNSVRTVTSDSSGNVLFDKLSPGFYAIKEEKAPDGYVKQQGIVRIFQVDSSGKVIKYQYFKDKSIAGKLTEITDLETEQLKQFNEIINKKFVFPMTGGQGIALLMIIGGTMMGIAYFGHRRKQRLND

SEQ ID NO: 312 - protein, 720 aa, Streptococcus pyogenes
MKTKIFSRLAAVLLVLGSLLPTVVAVAEAESSHKTDVVIHKIKMTSLKGWPKEKNPDGTYTGLGDKNYNGEKIDTITSYFGEGAEELDGVSFTYWSVDKEKYKKLTKNPQNYDTVPKMKAFLQGTEKNKALENSSETIDGKTTGHTADKGGVKVKDLADGYYWFVENSGSNIANGETLSSSAAVPFGLELPVYKADGSTITELHVYPKNTTTKPKIDKNFSKDEKDAALAGGANYDYYQKDKGYVSRIIGSEVSYQIKTEIPAGAQYQTLRWEDTMTKGLTYKAGSLELTITTKGDGKAALNFEFQTDYKLTENQSGFVLKFTESGLEKVKKAVQATKDAKGQVTADGHPMTVDISYKATVNSDAVVDQPDKNTVIFDYSNNPKEHKDPREKSTKPKDKQITVEKTWASQSAPTGIAVTYYLYQKGDESGKDKVVDSVTLTTDYKHIFTNLDDSKDYYVKESAIGYTPEYTEAKDGKISIKNTKDDKNPDPLKPTSPAIVTHGKKFVKTSQDDERLKGATFVVVDQKTNEKYLAIKADEKQSAEEKAYHDTEQKYQDEVKKATTEKPNSQAIEKAKKARDDAFKKARTAYEWVSDKQKAVKFTSNSKGQFEVTGLAAGTYYLEEVAAPTGFAKLQEKVEFTLGFNSYNGHKDQSGQSLEGHTQYEKGTPDFGYGQRVINKKITIPQTGGIGTVIFTVVGLAIMTVTGLMMIRRNKNDKSE

SEQ ID NO: 313 - protein, 281 aa, Streptococcus pyogenes
MGGTQLKIGRLIRLMLSICACLYFLTSPIFALQKTSSVTIHFENSDKDTQLALWQLPEGQTLPELETLFEKTDAELTRQYPQVSTVTVPKGETKLVLSNLPVGAIYYVREAEERLGVRSLAPFILKVDTDDDQAVYTKKAKAQKRGSYPFVKVSAQGGSLEGATFEVWKQTQKQLQPVIKGSSRYLLTSSKDGSFMARDLPFGSYVLKEITAPKGYLLSKKTIPFEVTDYSEKQAPVKVVNQPKIPPRIEIPYTGNAIMILVVLLGFALFTLGVYLVRRNG

SEQ ID NO: 314 - protein, 290 aa, Streptococcus pyogenes
MKKQSKRHRLNQNIALIVVFLIGLTILLYPQISRIYYTIESNYQSKQFDREKSTLHQEDISQRIALAKAFNASLHDVDLKDPYSDDEKTKGRAEYARMLELHEQIGHVEIPKIRVDLPIYAGTSDEIISKGSGHLEGTSLPVGGENTHTVLTSHSGLPSAKLFSDLAKLKKGDIFYIHNIKEILAYQIDQIKIIEPDNFSDLLIVPGKDYATLLTCTPVGINTHRLIVRGHRVPYVSNEHKNNKQKASSGYMCYLFVLLALLTLLFGYWFYRQKKKKSQKVKREEFHAKE

SEQ ID NO: 315 - protein, 277 aa, Streptococcus pyogenes
MLKNKQSLSLRERLIQVMFPLLFLMGCLIVLYPLMSNYYYRVKQNQAVTSFESAKVIVNKDDIKRRMALARAYNATLDPGRINDPYTDLEKKGVAEYARMLELNEQIGYVEVPRFDINLPIYAGTSDDVLQKAAGHLEGTSLPIGGDSTHTVITAHTGLPQAKLFTNIHKMKKGDLFFIHNIDKTLAYKVDQILVVEPDNFTPVLVKNGFDYATLLTCTPYGINSHRLLVRGYRVPYQKAFEKADAQRPWYTKVIFLVSFLLFVILVIILLIDWHRK

SEQ ID NO: 316 - protein, 238 aa, Streptococcus pyogenes
MSKQKCVGYVLMILGLGLPLFFLTLMSLNQFQEQVAYQKFQTENRSWKNSQKEWVNRHNQEQALADRATTDPFVDAQNQLKQSPFDDNIIGYIIIPKLRMAQPIRVGASERHLEKGVAQVTGTSLPIGGLGTRSVIAGHRSWYDNERFLRIAELSLGDQIVIDLGVYQLEYRVKSVEIIDAKDWRQLTAKKSQDLITLLTCNPLYPPFNERLLVMQRECCLAFLIYQLKREIRWINLN

SEQ ID NO: 317 - protein, 219 aa, Streptococcus pyogenes
MKRCNKYLFTSLLAASMLFSSYKSVHAHDNIDEEGKVHLYWQGNYYVDNYVDYTKKLVNNSIEWTVTFNSAKEQWVYPDFSVFLPKGVKAPKEITYEHHYGNGTVDSKKRSNTQWHYDWEKQKTNFNQEFDKFPGYTGWSRSLDKFYKLKNEGKFSHVLVDTYGRQSHTYFSHKMVWKFKTELEDNYKDKWNKLPFIAGIKQNNPLAASFPSYKGEFGE

SEQ ID NO: 318 - DNA, 2200 bp, Streptococcus pyogenes
  misc_feature 1439: n = A,T,C or G
actcttaaatactcaaagggtattaagtaaaaactcaaaacgatttactgtcactttagtgggagtctttttaatgatcttcgctttggtaacttccatggttggtgctaagactgtttttggtttagtagaatcctcgacgccaaacgcaataaatccagattcaagttcggaatacagatggtatggatatgaatcttatgtaagagggcatccatattataaacagtttagagtagcacacgatttaagggttaacttagaaggaagtagaagttatcaagtttattgctttaatttaaagaaagcatttcctctcggatcagatagtagtgttaaaaagtggtataaaaaacatgatggaatctctacaaaatttgaagattatgcgataagccctagaattacgggagatgagctaaatcagaagttacgagctgttatgtataatggacatccacaaaatgccaatggtattatggaaggcttggaacccttgaatgctatcagagttacacaagaggcggtatggtactattctgataatgctcctatttctaatccagatgaaagttttaaaagggagtcagaaagtaacttggttagtacttctcaattatctttgatgcgtcaagctttgaagcaactgattgatccgaatttggcaactaaaatgccaaaacaagttccggatgattttcagctaagtatttttgagtctgaggacaagggagataaatataataaaggataccaaaatcttttgagtggtggtttagttcctactaaaccaccaactccaggagacccaccaatgcctccaaatcaacctcaaacgacttcagtacttattagaaagtatgctataggtgattactctaaattgcttgaaggtgcaacattacagttgacaggggataacgtgaatagttttcaagcgagagtgtttagcagtaatgatattggagaaagaattgaactatcagatggaacttatactttaactgaattgaattctccagctggttatagtatcgcagagccaatcacttttaaggttgaagctggcaaagtgtatactattattgatggaaaacagattgaaaatcccaataaagagatagtagagccttactcagtagaagcatataatgattttgaagaatttagcgttttaactacacaaaactatgcaaaattttattatgcaaaaaataaaaatggaagttcacaggttgtctattgctttaatgcagatctaaaatctccaccagactctgaagatggtgggaaaacaatgactccagactttacaacaggagaagtaaaatacactcatattgcaggtcgtgacctctttaaatatactgtgaaaccaagagataccgatcctgacactttcttaaaacatatcaaaaaagtaattgagaagggttacngggaaaaaggacaagctattgagtatagtggtctaactgagacacaattgcgtgcggctactcagttagcaatatattatttcactgatagtgctgaattagataaggataaactaaaagactatcatggttttggagacatgaatgatagtactttagcagttgctaaaatccttgtagaatacgctcaagatagtaatcctccacagctaactgaccttgatttctttattccgaataacaataaatatcaatcccttattggaactcagtggcatccagaagatttagttgatattattcgtatggaagataaaaaagaagttatacctgtaactcataatttaacattgagaaaaacggtgactggtttagctggtgacagaactaaagatttccattttgaaattgaattaaaaaataataagcaagaattgctttctcaaactgttaaaacagataaaacaaacctcgaatttaaagatggtaaagcaaccattaatttaaaacatggggaaagtttaacacttcaaggtttaccagaaggttattcttaccttgtcaaagaaacagattctgaaggctataaggttaaagttaatagccaagaagtagcaaatgctacagtttcaaaaacaggaataacaagtgatgagacacttgcttttgaaaataataaagagcctgttgttcctacaggagttgatcaaaagatcaatggctatctagctttgatagttatcgctggtatcagtttgggg

SEQ ID NO: 319 - DNA, 894 bp, Streptococcus pyogenes
acaaaaaaccttgatttagttaatagcaatgcattaattccaaatacagattttacatttaaaatcgaacctgatactactgtcaacgaagacggaaataagtttaaaggtgtagctttgaacacaccgatgactaaagtcacttacaccaattcagataaaggtggatcaaatacgaaaactgcagaatttgatttttcagaagttacttttgaaaaaccaggtgtttattattacaaagtaactgaggagaagatagataaagttcctggtgtttcttatgatacaacatcttacactgttcaagttcatgtcttgtggaatgaagagcaacaaaaaccagtagctacttatattgttggttataaagaaggtagtaaggtgccaattcagttcaaaaatagcttagattctactacattaacggtgaagaaaaaagtttcaggtaccggtggagatcgctctaaagattttaattttggtctgactttaaaagcaaatcagtattataaggcgtcagaaaaagtcatgattgagaagacaactaaaggtggtcaagctcctgttcaaacagaggctagtatagatcaactctatcattttaccttgaaagatggtgaatcaatcaaagtcacaaatcttccagtaggtgtggattatgttgtcactgaagacgattacaaatcagaaaaatatacaaccaacgtggaagttagtcctcaagatggagctgtaaaaaatatcgcaggtaattcaactgaacaagagacatctactgataaagatatgaccattacttttacaaataaaaaagactttgaagtgccaacaggagtagcaatgactgtggcaccatatattgctttaggaattgtagcagttggtggagctctt

SEQ ID NO: 320 - DNA, 439 bp, Streptococcus pyogenes
  misc_feature 432: n = A,T,C or G
tattgaagttattaatcaagttgatgttgctaccaacaaacaatcctctgacatagatgaaacgtttatgtttgtaattgaagcgttagataaagaaagtcctttacctaattcggtaactacttctgttaagggaaatgggaaaacatcatttgaacagttgactttttcagaagttggacaatatcattataaaattcatcaactgttaggtaagaatagtcaatatcattatgatgaaacagtatatgaagttgttatttacgtattgtataatgagcaaagtggtgctttagaaactaacctagtttctaacaaacttggagaaaccgaaaaatcggagcttatttttaaacaagaatatagtgaaaaaacaccggaacctcatcaaccagatacaactgagaaggaaaaacctcagaaaaaacgtantggtatt

SEQ ID NO: 321 - DNA, 202 bp, Streptococcus pyogenes
atgaaattgtcaaagaagttgttgtattcagctgttgtgttagctacggtagcgggaccaactgttagcccagttgcacagtttgcgacaagtggaattgttgtaagagctgaggacaccagagtgccttctcaaactcaaccagataagacaactgtcaatatctataaattacaaggggctgatttttcaaaacaacctg

SEQ ID NO: 322 - DNA, 1222 bp, Streptococcus pyogenes
ggtagttggatatacggcggttccgtttattttgcatttaccagtatctaatagtaacgggaaaggatattatgacgaggttaacgtataccctaaaaatacaacagttaatgaacctaaagtcgataaagacgttactaaattagggaaagatgacgatacttaccaaattggtgataaaatcacatggtttttgaaatcaacagtcccatcaaatatcaagacgttagataagttcggattcacagatacattgaataagggattgtcttttatcggcgataaaacgcaaacagttactaaagttcaatttggtaccacagtacttagccccgatactgattacactgttgaaattttagattctaaattaacagtatcattgacatcagctggaattgaaaaggtttcaggtttggttgcatcaaaacaattgattaccgaggctgaaaaactttataaagcagaggataatacagatgaagcagcattcttatcagttgaagttaacgcaaaactaaatgcagatgctgtaatgggaagtcgtatcgaaaatgatgttgaacttgattatggacatgaatcggatatctataaatcaaaagttcctaccaatgaagttcctgaagtgcatacaggtggtgcaagattcgaaaaagttgatgcaacaaatcaaactgataaattgcaagatgcagaattcggattatatagtaatatcgaagcaacagaaactgtaaaatggacagaggaattgttgaaagcaaatgaagcagcaattaatgcaggaaagtttaaagaaagcaataccaccgtaggaactccaattattttcaaatctgcgtcagatggttcatttgaaattaaaggtcttagatatggtgatgattccaccaatacacgttctgatggcacagttggtacagctgaaaaaactggtaaaacaacttactatatcaaagagctagttgctcctaaaggttatgtggtttcacaagatattgttcaatttgatgtaacttatagtagctattataaagatccaacaaaagtaactttaggaactgaagcaggtgatgctgctcctacctcggttaaaaacaacaaacgtccttcaatccctaatactggtggtattggtacggctatctttgtcgctatcggtgctgcggtgatggcttttgctgctaagggtatgaaacgtcgtacagaagaaaactaa

SEQ ID NO: 323 - DNA, 924 bp, Streptococcus pyogenes
atgaaacaaacattaaaacttatggtttcttttctggtgatgttagggactatgtttggaattagccaaactgttttagcgcaaggaactcatcaattgacgattgtccatctcgaagcgagggatattgatcgtccatatccacagttggatatcgcccctaaagaagggactccaactgaaggagtactttatcaattgtaccaattgaaatcaactgaagatggcgatttgttggcacattggaattccctaactatcacagaattgaaaaaacaggcgcagcaggtttttgaagccactactaatcaacaaggaaaggctacatttaaccaactaccagatggaatttattatggtctagcggttaaagctggtgaaaaagatcgtaatgtctcagctttcttggttgacttgtctgaggataaagtgatttatcctaaaataatctggtccacaggtgagttggacttgcttaaagttggtgtggatggtgataccaaaaaaccactagcaggtgttgtctttgaactttatgaaaaggatggtatggttcctattcgtgtgaaaaatggagtgcattctcaagatattgacgctgcaaaacgtttagagacagactcatcaggacatatcagaatttcaggtctcattcctggggactatgttttaaaagaaattgagacacggtcaggatatcagattgaccagtcagagactgctgtaactattgaaaaatcaaaaacagtaacagtaacaattaaaaatcaaaaaattccgtcacctaaagtgccacctcgaggaggttttattcctaaaacaggtgagcaacaggcaatgatactggtaattattggtggtattttaattgctttagctttacgattactatcaaaacaccggaaaaatcaagataagcattag

SEQ ID NO: 324 - DNA, 567 bp, Streptococcus pyogenes
atgaaaaagaaacaaaaactatggagagggttatcagttactttactaatcctatcccaaatcccctttggtatattagtacaaggggaaactcaagataacaatccagcacttggaaaagtaattgttaaaaaaacgggagaaaatgctatgccattaggcaaagctacttttgtgttgaaaaatgaccatgataagtcagaaataagtcacgagacagtagagggttctggggaagcggcttttgaaaacataaaaccgggaaactacacattaacggaaaaaacagcaccaattggttataaaaaaactgataaaacctggaaagttaaagttgcagataatggggcaacaacgattgaggatatagatccagataaggtggagaaacgaaaagaagctttgaatggacaatatccagaatcagctatttatgaggatacaaaagaaagttatccattagttaaggtagaagattccaaagttggtaatcagtacaaagctctaaatcctatcaatggagaagatggtcgaagagagattacggaaggttggctatcaaaaaaa

SEQ ID NO: 325 - DNA, 2042 bp, Streptococcus pyogenes
ctatcgttgagacaaaagaacttaatcaaccattagatgttgttctgctattggataattcaaatagtatgaataatgaaagagcccacaattctcaaagagcattaaaagctggggaagcagttgaaaagctgattgataaaattacatcaaataaagacaatagagtagctcttgtgacatatgcctcaaccatttttgatggtactgaagcgactgtatcaaagggagttgccgatcgaaatggtaaagcgcttaatgatagtgtatcatgggattatcataaaaccacttttacagcaactacacataattacagttatttaaatttaacaaatgatgctaacgaagttaatattctaaagtcaagaattccaaaggaagcggagcatataaatgggaatcgcacgctctatcaatttggtgcgacatttactcaaaaagctctaatgaaagcaaatgaaattttagagacacaaagttctaatgatagaaaaaaagttatttttcacgtaactgatggtgtccctacgatgtcttatgccataaattttaatccttatatatcaacatcttaccaaaaccagtttaaatcttttttaaataaaacaccagatagaagtggtattctccaagaggattttataatcaatggtgatgattaccaaatagtaaaaggagacggagagagttttaaactgttttcggatagaaaagttcctgttcctggaggaacgacacaagcagcttatcaagtaccgcaaaatcaactctctgtaatgagtaatgagggatatgcaattaatagaggatatatttatctctattggagagattacaactgggtctatccatttgatcctaagacaaagacagtttctgcaacgaaacaaatcaaaactcatggtgagccaacaacgttatactttaatggaaatataaaacctaaaggttatgacatctttactgttgggattggtgtaaacggagatcctggtgcaactcctcttgaagctaaggaatttatgcaatcaatatcaagtaaaacagaaaattatactaatgttgatgatacaaataaaatttatgatgagctaaataaatactttaaaacaattgttgaggaaaaacattctattgttgatggaaatgtgactgatcctatgggagagatgattgaattccaattaaaagatggtcaaagctttacacatgatgattacgttttggttggaaatgatggtagtcaattaaaaaatggtgtggctcttggtggaccaaacagtgatgggggaattttaaaagatgttacagtgacttatgataagacatctcaaaccatcaaaatcaatcatttgaacttaggaagtggacaaaaagtagttcttacctatgatgtacgtttaaaagagaactatataagtaacaaattttacaatacaaataatcgtacaacgctaagtccgaagagtgaaaaagaaccaaatactattcgtgatttcccaattccaaaaattcgtgatgttcgggagtttccggtactaactatcagtaatcagaagaaaatgggtgaggttgaatttattaaagttaataaagacaaacattcagaatcgcttttgggggctaagtttcaacttcagatagaaaaagatttttctgggtataagcaatttgttccagagggaagtgatgtcacaacaaagaatgatggtaaaatttattttaaagcacttcaagatggtaactataaattatatgaaatttcaagtccagacggctatatagaggttaaaacgaaacctgttgtgacatttacaattcaaaatggagaagttacgaacctgaaacaagatccaaatgctaataaaaatcaaatcggatattttgaagaagatggaaaacatcttattaccaatactccaaaacgtccaccgagtgtttttcctaaaaccggaggaattggtacgattgtctatatattagtcggctgtactcttatgatagttgctactggttctttccgtcgtaatcaacagtaa

SEQ ID NO: 326 - DNA, 1737 bp, Streptococcus pyogenes
atgaaattgtcaaagaagttgttgtattcagctgttgtgttagctacggtagcgggaccaactgttagcccagttgcacagtttgcgacaagtggaattgttgtaagagctgaggacaccagagtgccttctcaaactcaaccagataagacaactgtcaatatctataaattacaaggggctgatttttcaaaacaacctgaaggaattaagaacgaaaatggagaaccaatagatattactaaactgaaggatacttttggtacagccgtcacatatttgccaggtgtgaaatttaaatattataaagtaaaaaattattcaacctcagatgatgttttgaaaagtataaaaacagtagagcaagctgatagtaagacagacttattggatgttgcaggcgcaaaggaaactgaagcaactgatcaaagtggtaaagttagcattgaccttccatcaaatgataaagttaagtatctgtttgttgaatcttccaatcaagatactgtgaacaaggtagttggatatacggcggttccgtttattttgcatttaccagtatctaatagtaacgggaaaggatattatgacgaggttaacgtataccctaaaaatacaacagttaatgaacctaaagtcgataaagacgttactaaattagggaaagatgacgatacttaccaaattggtgataaaatcacatggtttttgaaatcaacagtcccatcaaatatcaagacgttagataagttcggattcacagatacattgaataagggattgtcttttatcggcgataaaacgcaaacagttactaaagttcaatttggtaccacagtacttagccccgatactgattacactgttgaaattttagattctaaattaacagtatcattgacatcagctggaattgaaaaggtttcaggtttggttgcatcaaaacaattgattaccgaggctgaaaaactttataaagcagaggataatacagatgaagcagcattcttatcagttgaagttaacgcaaaactaaatgcagatgctgtaatgggaagtcgtatcgaaaatgatgttgaacttgattatggacatgaatcggatatctataaatcaaaagttcctaccaatgaagttcctgaagtgcatacaggtggtgcaagattcgaaaaagttgatgcaacaaatcaaactgataaattgcaagatgcagaattcggattatatagtaatatcgaagcaacagaaactgtaaaatggacagaggaattgttgaaagcaaatgaagcagcaattaatgcaggaaagtttaaagaaagcaataccaccgtaggaactccaattattttcaaatctgcgtcagatggttcatttgaaattaaaggtcttagatatggtgatgattccaccaatacacgttctgatggcacagttggtacagctgaaaaaactggtaaaacaacttactatatcaaagagctagttgctcctaaaggttatgtggtttcacaagatattgttcaatttgatgtaacttatagtagctattataaagatccaacaaaagtaactttaggaactgaagcaggtgatgctgctcctacctcggttaaaaacaacaaacgtccttcaatccctaatactggtggtattggtacggctatctttgtcgctatcggtgctgcggtgatggcttttgctgctaagggtatgaaacgtcgtacagaagaaaactaa

SEQ ID NO: 327 - DNA, 924 bp, Streptococcus pyogenes; identical to SEQ ID NO: 323

SEQ ID NO: 328 - DNA, 567 bp, Streptococcus pyogenes; identical to SEQ ID NO: 324

SEQ ID NO: 329 - DNA, 2137 bp, Streptococcus pyogenes
taatgaactcgataagaataaatataagattgaattgactgttgaagggaaaactatcgttgagacaaaagaacttaatcaaccattagatgttgttctgctattggataattcaaatagtatgaataatgaaagagcccacaattctcaaagagcattaaaagctggggaagcagttgaaaagctgattgataaaattacatcaaataaagacaatagagtagctcttgtgacatatgcctcaaccatttttgatggtactgaagcgactgtatcaaagggagttgccgatcgaaatggtaaagcgcttaatgatagtgtatcatgggattatcataaaaccacttttacagcaactacacataattacagttatttaaatttaacaaatgatgctaacgaagttaatattctaaagtcaagaattccaaaggaagcggagcatataaatgggaatcgcacgctctatcaatttggtgcgacatttactcaaaaagctctaatgaaagcaaatgaaattttagagacacaaagttctaatgatagaaaaaaagttatttttcacgtaactgatggtgtccctacgatgtcttatgccataaattttaatccttatatatcaacatcttaccaaaaccagtttaaatcttttttaaataaaacaccagatagaagtggtattctccaagaggattttataatcaatggtgatgattaccaaatagtaaaaggagacggagagagttttaaactgttttcggatagaaaagttcctgttcctggaggaacgacacaagcagcttatcaagtaccgcaaaatcaactctctgtaatgagtaatgagggatatgcaattaatagaggatatatttatctctattggagagattacaactgggtctatccatttgatcctaagacaaagacagtttctgcaacgaaacaaatcaaaactcatggtgagccaacaacgttatactttaatggaaatataaaacctaaaggttatgacatctttactgttgggattggtgtaaacggagatcctggtgcaactcctcttgaagctaaggaatttatgcaatcaatatcaagtaaaacagaaaattatactaatgttgatgatacaaataaaatttatgatgagctaaataaatactttaaaacaattgttgaggaaaaacattctattgttgatggaaatgtgactgatcctatgggagagatgattgaattccaattaaaagatggtcaaagctttacacatgatgattacgttttggttggaaatgatggtagtcaattaaaaaatggtgtggctcttggtggaccaaacagtgatgggggaattttaaaagatgttacagtgacttatgataagacatctcaaaccatcaaaatcaatcatttgaacttaggaagtggacaaaaagtagttcttacctatgatgtacgtttaaaagagaactatataagtaacaaattttacaatacaaataatcgtacaacgctaagtccgaagagtgaaaaagaaccaaatactattcgtgatttcccaattccaaaaattcgtgatgttcgggagtttccggtactaactatcagtaatcagaagaaaatgggtgaggttgaatttattaaagttaataaagacaaacattcagaatcgcttttgggggctaagtttcaacttcagatagaaaaagatttttctgggtataagcaatttgttccagagggaagtgatgtcacaacaaagaatgatggtaaaatttattttaaagcacttcaagatggtaactataaattatatgaaatttcaagtccagacggctatatagaggttaaaacgaaacctgttgtgacatttacaattcaaaatggagaagttacgaacctgaaacaagatccaaatgctaataaaaatcaaatcggatattttgaagaagatggaaaacatcttattaccaatactccaaaacgtccaccgagtgtttttcctaaaaccggaggaattggtacgattgtctatatattagtcggctgtactcttatgatagttgctactggttctttccgtcgtaatcaacagtaaggtatcgttaaagtaattaaataatagagaatgattagttct

SEQ ID NO: 330 - DNA, 1811 bp, Streptococcus pyogenes
atgaaattgtcaaagaagttgttgtattcagctgttgtgttagctacggtagcgggaccaactgttagcccagttgcacagtttgcgacaagtggaattgttgtaagagctgaggacaccagagtgccttctcaaactcaaccagataagacaactgtcaatatctataaattacaaggggctgatttttcaaaacaacctgaaggaattaagaacgaaaatggagaaccaatagatattactaaactgaaggatacttttggtacagccgtcacatatttgccaggtgtgaaatttaaatattataaagtaaaaaattattcaacctcagatgatgttttgaaaagtataaaaacagtagagcaagctgatagtaagacagacttattggatgttgcaggcgcaaaggaaactgaagcaactgatcaaagtggtaaagttagcattgaccttccatcaaatgataaagttaagtatctgtttgttgaatcttccaatcaagatactgtgaacaaggtagttggatatacggcggttccgtttattttgcatttaccagtatctaatagtaacgggaaaggatattatgacgaggttaacgtataccctaaaaatacaacagttaatgaacctaaagtcgataaagacgttactaaattagggaaagatgacgatacttaccaaattggtgataaaatcacatggtttttgaaatcaacagtcccatcaaatatcaagacgttagataagttcggattcacagatacattgaataagggattgtcttttatcggcgataaaacgcaaacagttactaaagttcaatttggtaccacagtacttagccccgatactgattacactgttgaaattttagattctaaattaacagtatcattgacatcagctggaattgaaaaggtttcaggtttggttgcatcaaaacaattgattaccgaggctgaaaaactttataaagcagaggataatacagatgaagcagcattcttatcagttgaagttaacgcaaaactaaatgcagatgctgtaatgggaagtcgtatcgaaaatgatgttgaacttgattatggacatgaatcggatatctataaatcaaaagttcctaccaatgaagttcctgaagtgcatacaggtggtgcaagattcgaaaaagttgatgcaacaaatcaaactgataaattgcaagatgcagaattcggattatatagtaatatcgaagcaacagaaactgtaaaatggacagaggaattgttgaaagcaaatgaagcagcaattaatgcaggaaagtttaaagaaagcaataccaccgtaggaactccaattattttcaaatctgcgtcagatggttcatttgaaattaaaggtcttagatatggtgatgattccaccaatacacgttctgatggcacagttggtacagctgaaaaaactggtaaaacaacttactatatcaaagagctagttgctcctaaaggttatgtggtttcacaagatattgttcaatttgatgtaacttatagtagctattataaagatccaacaaaagtaactttaggaactgaagcaggtgatgctgctcctacctcggttaaaaacaacaaacgtccttcaatccctaatactggtggtattggtacggctatctttgtcgctatcggtgctgcggtgatggcttttgctgctaagggtatgaaacgtcgtacagaagaaaactaaataaaaggctacttcttaagtaaccatgtttaagaaaagagaaatagccttatttctcttttcgtcgtttttaa

SEQ ID NO: 331 - DNA, 843 bp, Streptococcus pyogenes
caaggaactcatcaattgacgattgtccatctcgaagcgagggatattgatcgtccatatccacagttggatatcgcccctaaagaagggactccaactgaaggagtactttatcaattgtaccaattgaaatcaactgaagatggcgatttgttggcacattggaattccctaactatcacagaattgaaaaaacaggcgcagcaggtttttgaagccactactaatcaacaaggaaaggctacatttaaccaactaccagatggaatttattatggtctagcggttaaagctggtgaaaaagatcgtaatgtctcagctttcttggttgacttgtctgaggataaagtgatttatcctaaaataatctggtccacaggtgagttggacttgcttaaagttggtgtggatggtgataccaaaaaaccactagcaggtgttgtctttgaactttatgaaaaggatggtatggttcctattcgtgtgaaaaatggagtgcattctcaagatattgacgctgcaaaacgtttagagacagactcatcaggacatatcagaatttcaggtctcattcctggggactatgttttaaaagaaattgagacacggtcaggatatcagattgaccagtcagagactgctgtaactattgaaaaatcaaaaacagtaacagtaacaattaaaaatcaaaaaattccgtcacctaaagtgccacctcgaggaggttttattcctaaaacaggtgagcaacaggcaatgatactggtaattattggtggtattttaattgctttagctttacgattactatcaaaacaccggaaaaatcaagataagcattag

SEQ ID NO: 332 - DNA, 476 bp, Streptococcus pyogenes
atgaaaaagaaacaaaaactatggagagggttatcagttactttactaatcctatcccaaatcccctttggtatattagtacaaggggaaactcaagataacaatccagcacttggaaaagtaattgttaaaaaaacgggagaaaatgctatgccattaggcaaagctacttttgtgttgaaaaatgaccatgataagtcagaaataagtcacgagacagtagagggttctggggaagcggcttttgaaaacataaaaccgggaaactacacattaacggaaaaaacagcaccaattggttataaaaaaactgataaaacctggaaagttaaagttgcagataatggggcaacaacgattgaggatatagatccagataaggtggagaaacgaaaagaagctttgaatggacaatatccagaatcagctatttatgaggatacaaaagaaagttatccattagttaaggtagaaga

SEQ ID NO: 333 - DNA, 2067 bp, Streptococcus pyogenes
gaacttaatcaaccattagatgttgttctgctattggataattcaaatagtatgaataatgaaagagcccacaattctcaaagagcattaaaagctggggaagcagttgaaaagctgattgataaaattacatcaaataaagacaatagagtagctcttgtgacatatgcctcaaccatttttgatggtactgaagcgactgtatcaaagggagttgccgatcgaaatggtaaagcgcttaatgatagtgtatcatgggattatcataaaaccacttttacagcaactacacataattacagttatttaaatttaacaaatgatgctaacgaagttaatattctaaagtcaagaattccaaaggaagcggagcatataaatgggaatcgcacgctctatcaatttggtgcgacatttactcaaaaagctctaatgaaagcaaatgaaattttagagacacaaagttctaatgatagaaaaaaagttatttttcacgtaactgatggtgtccctacgatgtcttatgccataaattttaatccttatatatcaacatcttaccaaaaccagtttaaatcttttttaaataaaacaccagatagaagtggtattctccaagaggattttataatcaatggtgatgattaccaaatagtaaaaggagacggagagagttttaaactgttttcggatagaaaagttcctgttcctggaggaacgacacaagcagcttatcaagtaccgcaaaatcaactctctgtaatgagtaatgagggatatgcaattaatagaggatatatttatctctattggagagattacaactgggtctatccatttgatcctaagacaaagacagtttctgcaacgaaacaaatcaaaactcatggtgagccaacaacgttatactttaatggaaatataaaacctaaaggttatgacatctttactgttgggattggtgtaaacggagatcctggtgcaactcctcttgaagctaaggaatttatgcaatcaatatcaagtaaaacagaaaattatactaatgttgatgatacaaataaaatttatgatgagctaaataaatactttaaaacaattgttgaggaaaaacattctattgttgatggaaatgtgactgatcctatgggagagatgattgaattccaattaaaagatggtcaaagctttacacatgatgattacgttttggttggaaatgatggtagtcaattaaaaaatggtgtggctcttggtggaccaaacagtgatgggggaattttaaaagatgttacagtgacttatgataagacatctcaaaccatcaaaatcaatcatttgaacttaggaagtggacaaaaagtagttcttacctatgatgtacgtttaaaagagaactatataagtaacaaattttacaatacaaataatcgtacaacgctaagtccgaagagtgaaaaagaaccaaatactattcgtgatttcccaattccaaaaattcgtgatgttcgggagtttccggtactaactatcagtaatcagaagaaaatgggtgaggttgaatttattaaagttaataaagacaaacattcagaatcgcttttgggggctaagtttcaacttcagatagaaaaagatttttctgggtataagcaatttgttccagagggaagtgatgtcacaacaaagaatgatggtaaaatttattttaaagcacttcaagatggtaactataaattatatgaaatttcaagtccagacggctatatagaggttaaaacgaaacctgttgtgacatttacaattcaaaatggagaagttacgaacctgaaacaagatccaaatgctaataaaaatcaaatcggatattttgaagaagatggaaaacatcttattaccaatactccaaaacgtccaccgagtgtttttcctaaaaccggaggaattggtacgattgtctatatattagtcggctgtactcttatgatagttgctactggttctttccgtcgtaatcaacagtaaggtatcgttaaagtaattaaataatagagaatgattagttct

SEQ ID NO: 334 - DNA, 1737 bp, Streptococcus pyogenes; identical to SEQ ID NO: 326

SEQ ID NO: 335 - DNA, 924 bp, Streptococcus pyogenes; identical to SEQ ID NO: 323

SEQ ID NO: 336 - DNA, 2694 bp, Streptococcus pyogenes
  misc_feature 568: n = A,T,C or G
atgaaaaagaaacaaaaactatggagagggttatcagttactttactaatcctatcccaaatcccctttggtatattagtacaaggggaaactcaagataacaatccagcacttggaaaagtaattgttaaaaaaacgggagaaaatgctatgccattaggcaaagctacttttgtgttgaaaaatgaccatgataagtcagaaataagtcacgagacagtagagggttctggggaagcggcttttgaaaacataaaaccgggaaactacacattaacggaaaaaacagcaccaattggttataaaaaaactgataaaacctggaaagttaaagttgcagataatggggcaacaacgattgaggatatagatccagataaggtggagaaacgaaaagaagctttgaatggacaatatccagaatcagctatttatgaggatacaaaagaaagttatccattagttaaggtagaagattccaaagttggtaatcagtacaaagctctaaatcctatcaatggagaagatggtcgaagagagattacggaaggttggctatcaaaaaaantcaaaaaggttaatgaactcgataagaataaatataagattgaattgactgttgaagggaaaactatcgttgagacaaaagaacttaatcaaccattagatgttgttctgctattggataattcaaatagtatgaataatgaaagagcccacaattctcaaagagcattaaaagctggggaagcagttgaaaagctgattgataaaattacatcaaataaagacaatagagtagctcttgtgacatatgcctcaaccatttttgatggtactgaagcgactgtatcaaagggagttgccgatcgaaatggtaaagcgcttaatgatagtgtatcatgggattatcataaaaccacttttacagcaactacacataattacagttatttaaatttaacaaatgatgctaacgaagttaatattctaaagtcaagaattccaaaggaagcggagcatataaatgggaatcgcacgctctatcaatttggtgcgacatttactcaaaaagctctaatgaaagcaaatgaaattttagagacacaaagttctaatgatagaaaaaaagttatttttcacgtaactgatggtgtccctacgatgtcttatgccataaattttaatccttatatatcaacatcttaccaaaaccagtttaaatcttttttaaataaaacaccagatagaagtggtattctccaagaggattttataatcaatggtgatgattaccaaatagtaaaaggagacggagagagttttaaactgttttcggatagaaaagttcctgttcctggaggaacgacacaagcagcttatcaagtaccgcaaaatcaactctctgtaatgagtaatgagggatatgcaattaatagaggatatatttatctctattggagagattacaactgggtctatccatttgatcctaagacaaagacagtttctgcaacgaaacaaatcaaaactcatggtgagccaacaacgttatactttaatggaaatataaaacctaaaggttatgacatctttactgttgggattggtgtaaacggagatcctggtgcaactcctcttgaagctaaggaatttatgcaatcaatatcaagtaaaacagaaaattatactaatgttgatgatacaaataaaatttatgatgagctaaataaatactttaaaacaattgttgaggaaaaacattctattgttgatggaaatgtgactgatcctatgggagagatgattgaattccaattaaaagatggtcaaagctttacacatgatgattacgttttggttggaaatgatggtagtcaattaaaaaatggtgtggctcttggtggaccaaacagtgatgggggaattttaaaagatgttacagtgacttatgataagacatctcaaaccatcaaaatcaatcatttgaacttaggaagtggacaaaaagtagttcttacctatgatgtacgtttaaaagagaactatataagtaacaaattttacaatacaaataatcgtacaacgctaagtccgaagagtgaaaaagaaccaaatactattcgtgatttcccaattccaaaaattcgtgatgttcgggagtttccggtactaactatcagtaatcagaagaaaatgggtgaggttgaatttattaaagttaataaagacaaacattcagaatcgcttttgggggctaagtttcaacttcagatagaaaaagatttttctgggtataagcaatttgttccagagggaagtgatgtcacaacaaagaatgatggtaaaatttattttaaagcacttcaagatggtaactataaattatatgaaatttcaagtccagacggctatatagaggttaaaacgaaacctgttgtgacatttacaattcaaaatggagaagttacgaacctgaaacaagatccaaatgctaataaaaatcaaatcggatattttgaagaagatggaaaacatcttattaccaatactccaaaacgtccaccgagtgtttttcctaaaaccggaggaattggtacgatttgtctatatattagtcggctgtactcttatgatagttgctactggttctttccgtcgtaatcaacagtaaggtatcgttaaagtaattaa

SEQ ID NO: 337 - DNA, 764 bp, Streptococcus pyogenes
agaggtagaaagtttaccgaatcaggttcccgcaaattatcagttaagtatttttcaatcttctgataagactttccaaaatcttttaagtgctgagtatgttccggatactcccccaaaaccaggagaagagcctccggctaaaactgaaaaaacatcagtcattatcagaaaatatgcggaaggtgactactctaaacttctagagggagcaaccttaaagcttgctcaaattgaaggaagtggttttcaggagaaaatttttgatagtaacaagtctggagagaaagtagagctacctaatgggacttacgttttaagtgagctaaaacctcctcaaggatatggagttgccacacccattacttttaaagttgcagctgagaaagttttaataaaaaataaagaaggtcaatttgtagagaaccaaaataaggaaatcgcagagccatattctgtaacagctttcaatgactttgaagagattggttatttatctgattttaataactatggtaagttttactatgcaaaaaatactaatggaactaatcaagttgtctactgtttcaatgctgatttacactcaccacctgactcatatgatcacggagcaaatattgatcctgatgtcagtgaaagtaaagagataaagtatacacatgtttctggctatgatttgtataaatatgcagccacaccaagagacaaagatgctgatttcttcttaaaacatatcaagaaaattcttgataaaggttata

SEQ ID NO: 338 - DNA, 357 bp, Streptococcus pyogenes
  misc_feature 153: n = A,T,C or G
acagcactgttcaaactagcattagtgtcgaaaatgtcttagagagagcaggcgatagtactccattttcgattgcattagaatcaattgatgcgatgaaaacaatagaagaaataacaattgctggttctgggaaagcaagcttttcccctntgaccttcacaacagttgggcaatatacttatcgtgtttatcagaagccttcacaaaataaagattatcaagcagatactactgtatttgacgttcttgtctatgtgacctatgatgaagatgggactctagtcgcaaaagttatttctcgaagggctggagacgaagaaaaatcagcgattacttttaagcccaaatggttag

SEQ ID NO: 339 - DNA, 1995 bp, Streptococcus pyogenes
gctagcgctgaagaacaatcagtgccaaataaacaaagctcagttcaagattatccgtggtatggctatgattcttattctaaaggctacccagactatagtccgttaaagacttaccataatttaaaagtaaatttagatggaagtaaggagtatcaagcatactgctttaatttaacaaaacactttccatccaagtcagatagtgttagatcacaatggtataaaaaacttgaaggaactaatgaaaactttatcaagttagcagataaaccaagaatagaagacggacagttacaacaaaatatattgaggattctctataatggatatcctaatgatcgtaatgggataatgaaagggatagatcctctaaacgctattttagtgactcaaaatgctatttggtactatactgatagttcctatatttctgatactagtaaagcttttcaacaagaagaaacagatcttaaattagattcacagcaactacaactaatgcgtaatgcgctaaaaagattaattaatccaaaagaggtagaaagtttaccgaatcaggttcccgcaaattatcagttaagtatttttcaatcttctgataagactttccaaaatcttttaagtgctgagtatgttccggatactcccccaaaaccaggagaagagcctccggctaaaactgaaaaaacatcagtcattatcagaaaatatgcggaaggtgactactctaaacttctagagggagcaaccttaaagcttgctcaaattgaaggaagtggttttcaggagaaaatttttgatagtaacaagtctggagagaaagtagagctacctaatgggacttacgttttaagtgagctaaaacctcctcaaggatatggagttgccacacccattacttttaaagttgcagctgagaaagttttaataaaaaataaagaaggtcaatttgtagagaaccaaaataaggaaatcgcagagccatattctgtaacagctttcaatgactttgaagagattggttatttatctgattttaataactatggtaagttttactatgcaaaaaatactaatggaactaatcaagttgtctactgtttcaatgctgatttacactcaccacctgactcatatgatcacggagcaaatattgatcctgatgtcagtgaaagtaaagagataaagtatacacatgtttctggctatgatttgtataaatatgcagccacaccaagagacaaagatgctgatttcttcttaaaacatatcaagaaaattcttgataaaggttataagaagaagggggatacctataagacattaactgaagctcagtttagagcagcaacccaattagctatttattactatacagatagtgctgatttaacaacacttaagacatataatgataacaagggttatcatggttttgataaactggatgatgcaacattagctgtagttcatgagttgatcacctatgctgaggatgtcaccttaccaatgactcaaaatctagatttctttgttcctaatagcagtagataccaggcacttattggaacgcagtatcatccaaatgaattgattgatgttatttctatggaagataaacaggctcctattattcctattactcacaagttaactatttctaaaactgttactggaactattgcagataagaaaaaagaatttaactttgaaatacatttaaaatcttctgatggacaagctataagtggaacatatccgacaaactctggagaactcacagttacagatggaaaagctaccttcacattaaaggatggagaatcattgattgttgaggggctaccttcaggttactcttatgaaattacagaaacgggtgcttcagattatgaggtaagtgttaatggaaaaaatgcaccagatggaaaagcgacgaaagcctcagttaaggaagatgagactgtagcttttgaaaaccgaaaagatctt

SEQ ID NO: 340 - DNA, 948 bp, Streptococcus pyogenes
gagacggcaggagtgtccgaaaatgcaaaattaatagtaaaaaagacatttgactcttatacagacaatgaagttttaatgccaaaagctgattatacttttaaagtagaggcagatagtacagctagtggcaaaacgaaagacggtttagagattaagccaggtattgttaatggtttaacagaacagattatcagctatactaatactgataaaccagatagtaaagttaaaagtacagagtttgatttttcaaaagtagtattccctggtattggtgtttaccgctatactgtttcagaaaaacaaggtgatgttgaaggaattacctacgatactaagaagtggacagtagatgtttatgttggaaacaaagaaggtggtggttttgaacctaagtttattgtatctaaggaacaaggaacagacgtcaaaaaaccagttaattttaacaactcgtttgcaactacttcgttaaaagttaagaagaatgtatcggggaatactggagaattgcaaaaagaatttgactttacattgacgcttaatgaaagcacgaattttaaaaaagatcaaattgtttctttacaaaaaggaaacgagaaatttgaagttaagattggtactccctacaagtttaaactcaaaaatggggaatctattcaactagacaagttaccagttggtattacttataaagtcaatgaaatggaagctaataaagatgggtataaaacaacagcatccttgaaagagggagatggtcaatctaaaatgtatcaattggatatggaacaaaaaacagacgaatctgctgacgaaatcgttgtcacaaataagcgtgacactcaagttccaactggtgttgtaggcacccttgctccatttgcagttcttagcattgtggctattggtggagttatctatattacaaaacgtaaaaaagct

SEQ ID NO: 341 - DNA, 405 bp, Streptococcus pyogenes
aaagacagcactgttcaaactagcattagtgtcgaaaatgtcttagagagagcaggcgatagtactccattttcgattgcattagaatcaattgatgcgatgaaaacaatagaagaaataacaattgctggttctgggaaagcaagcttttcccctctgaccttcacaacagttgggcaatatacttatcgtgtttatcagaagccttcacaaaataaagattatcaagcagatactactgtatttgacgttcttgtctatgtgacctatgatgaagatgggactctagtcgcaaaagttatttctcgaagggctggagacgaagaaaaatcagcgattacttttaagcccaaatggttagtaaaaccaataccgcctagacaacctaacatccctaaaacccca

SEQ ID NO: 342 - DNA, 476 bp, Streptococcus pyogenes
gaagcagaatcatcacataaaaccgatgttgttattcataaaatcaaaatgacgagcttaaaaggctggccaaaagaaaaaaatccggatgggacttatacaggacttggtgataagaattataatggtgaaaaaattgatacaataacgagttattttggtgaaggtgctgaggaacttgatggtgttagttttacttactggagtgtagacaaagaaaagtataagaagttaactaaaaatcctcaaaactacgatacggtaccaaaaatgaaagcattcttacaaggtactgagaaaaataaagctctagagaactcttcggaaactattgacgggaagaccactggtcatactgctgataaaggtggcgtcaaagttaaggatcttgcagatggttactattggtttgtcgaaaattcgggttccaatattgcgaatggagagaccttgtcttctagtgcggctgttccatt

SEQ ID NO: 343 - DNA, 624 bp, Streptococcus pyogenes
  misc_feature 573: n = A,T,C or G
aaattgataagaattttagtaaagatgaaaaagatgcagcactagcaggtggagctaattatgattattatcaaaaggataagggttatgtttcacgtataattggttcagaagtttcttatcaaattaaaacagagattccagctggtgcacagtatcagacccttcgatgggaagacacgatgactaaaggtttgacttataaagctgggagtttagagctaactatcacaacaaagggtgatgggaaagctgccctgaactttgagtttcaaacagattataaactaacagaaaatcaaagtggatttgtcttgaaattcactgaatcgggtctagaaaaagttaaaaaagctgttcaagcaactaaggacgctaagggtcaagttacagctgatggtcacccaatgacagtggatataagctataaagcgactgtcaatagcgatgccgtcgttgaccaaccagacaagaatacagttatctttgattacagcaacaatcctaaagaacataaagacccaagagaaaagtctacaaaaccgaaagataaacaaatcactgttgaaaaancatgggctagtcaatcagcaccaacaggtattgcagtgacctactaccttt

SEQ ID NO: 344 - DNA, 627 bp, Streptococcus pyogenes
  misc_feature 612: n = A,T,C or G
ggtggtggattcagtcacattgactacagattataagcacatctttacaaacttagatgactccaaggactactatgtaaaagaaagtgccattggttacacaccagagtacactgaagctaaagatggaaaaatttccatcaagaacaccaaagatgataaaaatccagatcctcttaaaccaactagtccagcaattgtaacacatggtaaaaaattcgttaaaactagtcaagacgacgaacgtctaaaaggagccacctttgttgtagtagatcaaaaaactaatgagaaatacttagccattaaagccgatgaaaagcagtctgctgaagaaaaagcataccacgacacagagcaaaaatatcaagacgaagtcaaaaaagctactacagaaaaacctaattctcaagcaattgaaaaagctaaaaaagcgcgtgacgatgccttcaaaaaagcaagaactgcttatgaatgggtaagtgataaacaaaaagcagtcaaattcacgtcaaatagtaaaggacagtttgaggtaacagggcttgcagctggaacctattacttagaagaggtagcagctcctactggctttgcaaaacttcaagaaanggttgagtttacact

SEQ ID NO: 345 - DNA, 51 bp, Streptococcus pyogenes
  misc_feature 46: n = A,T,C or G
ggaacacctgattttggttacggacaacgggtgattaacaaaaaantcacc

SEQ ID NO: 346 - DNA, 657 bp, Streptococcus pyogenes
ttgcagaaaacgtcatccgtgacgattcattttgagaattctgataaggatacacaactagcgttgtggcaattgcccgagggacaaactttgcccgaactggaaacactatttgagaagacagatgctgagttaacccgtcagtatcctcaagtatcaactgtcacagtaccaaaaggtgagactaagcttgtattatcaaatctacctgtaggagcgatttactacgttagagaggcagaagaacgcttaggagttcgctcgctagcgccctttatcttgaaggttgatacagatgatgatcaggccgtttatacaaagaaagcaaaggcccaaaaacgtggttcgtacccttttgttaaagtttctgctcaaggtggtagtctagaaggagcaacttttgaggtttggaaacaaacccaaaaacagctacaacctgttattaaaggtagcagtcggtatctcctaacgtcctcgaaagatggttcttttatggcaagagatttgccatttgggtcttatgttttaaaagaaatcactgctccaaaaggttatcttttgtcaaaaaaaactataccatttgaagtaacagattattcagaaaaacaagcccctgtgaaagtcgtcaaccagcccaagatccctcctagaattgaa

SEQ ID NO: 347 - DNA, 470 bp, Streptococcus pyogenes
gaagcagaatcatcacataaaaccgatgttgttattcataaaatcaaaatgacgagcttaaaaggctggccaaaagaaaaaaatccggatgggacttatacaggacttggtgataagaattataatggtgaaaaaattgatacaataacgagttattttggtgaaggtgctgaggaacttgatggtgttagttttacttactggagtgtagacaaagaaaagtataagaagttaactaaaaatcctcaaaactacgatacggtaccaaaaatgaaagcattcttacaaggtactgagaaaaataaagctctagagaactcttcggaaactattgacgggaagaccactggtcatactgctgataaaggtggcgtcaaagttaaggatcttgcagatggttactattggtttgtcgaaaattcgggttccaatattgcgaatggagagaccttgtcttctagtgcggctgt

SEQ ID NO: 348 - DNA, 624 bp, Streptococcus pyogenes; identical to SEQ ID NO: 343
  misc_feature 573: n = A,T,C or G

SEQ ID NO: 349 - DNA, 683 bp, Streptococcus pyogenes
ggtggtggattcagtcacattgactacagattataagcacatctttacaaacttagatgactccaaggactactatgtaaaagaaagtgccattggttacacaccagagtacactgaagctaaagatggaaaaatttccatcaagaacaccaaagatgataaaaatccagatcctcttaaaccaactagtccagcaattgtaacacatggtaaaaaattcgttaaaactagtcaagacgacgaacgtctaaaaggagccacctttgttgtagtagatcaaaaaactaatgagaaatacttagccattaaagccgatgaaaagcagtctgctgaagaaaaagcataccacgacacagagcaaaaatatcaagacgaagtcaaaaaagctactacagaaaaacctaattctcaagcaattgaaaaagctaaaaaagcgcgtgacgatgccttcaaaaaagcaagaactgcttatgaatgggtaagtgataaacaaaaagcagtcaaattcacgtcaaatagtaaaggacagtttgaggtaacagggcttgcagctggaacctattacttagaagaggtagcagctcctactggctttgcaaaacttcaagaaaaggttgagtttacacttggtttcaactcttacaatgggcataaagatcaatctggtcaaagtttggaagggc

SEQ ID NO: 350 - DNA, 51 bp, Streptococcus pyogenes
ggaacacctgattttggttacggacaacgggtgattaacaaaaaaatcacc

SEQ ID NO: 351 - DNA, 657 bp, Streptococcus pyogenes; identical to SEQ ID NO: 346

SEQ ID NO: 352 - DNA, 481 bp, Streptococcus pyogenes
gaagcagaatcatcacataaaaccgatgttgttattcataaaatcaaaatgacgagcttaaaaggctggccaaaagaaaaaaatccggatgggacttatacaggacttggtgataagaattataatggtgaaaaaattgatacaataacgagttattttggtgaaggtgctgaggaacttgatggtgttagttttacttactggagtgtagacaaagaaaagtataagaagttaactaaaaatcctcaaaactacgatacggtaccaaaaatgaaagcattcttacaaggtactgagaaaaataaagctctagagaactcttcggaaactattgacgggaagaccactggtcatactgctgataaaggtggcgtcaaagttaaggatcttgcagatggttactattggtttgtcgaaaattcgggttccaatattgcgaatggagagaccttgtcttctagtgcggctgttccatttggat

SEQ ID NO: 353 - DNA, 615 bp, Streptococcus pyogenes
  misc_feature 564: n = A,T,C or G
agaattttagtaaagatgaaaaagatgcagcactagcaggtggagctaattatgattattatcaaaaggataagggttatgtttcacgtataattggttcagaagtttcttatcaaattaaaacagagattccagctggtgcacagtatcagacccttcgatgggaagacacgatgactaaaggtttgacttataaagctgggagtttagagctaactatcacaacaaagggtgatgggaaagctgccctgaactttgagtttcaaacagattataaactaacagaaaatcaaagtggatttgtcttgaaattcactgaatcgggtctagaaaaagttaaaaaagctgttcaagcaactaaggacgctaagggtcaagttacagctgatggtcacccaatgacagtggatataagctataaagcgactgtcaatagcgatgccgtcgttgaccaaccagacaagaatacagttatctttgattacagcaacaatcctaaagaacataaagacccaagagaaaagtctacaaaaccgaaagataaacaaatcactgttgaaaaancatgggctagtcaatcagcaccaacaggtattgcagtgacctactaccttt

SEQ ID NO: 354 - DNA, 660 bp, Streptococcus pyogenes
ggtggtggattcagtcacattgactacagattataagcacatctttacaaacttagatgactccaaggactactatgtaaaagaaagtgccattggttacacaccagagtacactgaagctaaagatggaaaaatttccatcaagaacaccaaagatgataaaaatccagatcctcttaaaccaactagtccagcaattgtaacacatggtaaaaaattcgttaaaactagtcaagacgacgaacgtctaaaaggagccacctttgttgtagtagatcaaaaaactaatgagaaatacttagccattaaagccgatgaaaagcagtctgctgaagaaaaagcataccacgacacagagcaaaaatatcaagacgaagtcaaaaaagctactacagaaaaacctaattctcaagcaattgaaaaagctaaaaaagcgcgtgacgatgccttcaaaaaagcaagaactgcttatgaatgggtaagtgataaacaaaaagcagtcaaattcacgtcaaatagtaaaggacagtttgaggtaacagggcttgcagctggaacctattacttagaagaggtagcagctcctactggctttgcaaaacttcaagaaaaggttgagtttacacttggtttcaactcttacaatgggcataaagatca

SEQ ID NO: 355 - DNA, 51 bp, Streptococcus pyogenes; identical to SEQ ID NO: 350

SEQ ID NO: 356 - DNA, 657 bp, Streptococcus pyogenes; identical to SEQ ID NO: 346

SEQ ID NO: 357 - DNA, 858 bp, Streptococcus pyogenes
gagacggcaggggttgtaacaggaaaatcactacaagttacaaagacaatgacttatgatgatgaagaggtgttaatgcccgaaaccgcctttacttttactatagagcctgatatgactgcaagtggaaaagaaggcgacctagatattaaaaatggaattgtagaaggcttagacaaacaagtaacagtaaaatataagaatacagataaaacatctcaaaaaactaaaatagcacaatttgatttttctaaggttaaatttccagctataggtgtttaccgctatatggtttcagagaaaaacgataaaaaagacggaattaggtacgatgataaaaagtggactgtagatgtttatgttgggaataaggccaataacgaagaaggtttcgaagttctatatattgtatcaaaagaaggtacttctagtactaaaaaaccaattgaatttacaaactctattaaaactacttccttaaaaattgaaaaacaaataactggcaatgcaggagatcgtaaaaaatcattcaacttcacattaacattacaaccaagtgaatattataaaaccggatcagttgtgaaaatcgaacaggatggaagtaaaaaagatgtgacgataggaacgccttacaaatttactttgggacacggtaagagtgtcatgttatcgaaattaccaattggtatcaattactatcttagtgaagacgaagcgaataaagacggttacactacaacggcaacattaaaagaacaaggcaaagaaaagagttccgatttcactttgagtactcaaaaccagaaaacagacgaatctgctgacgaaatcgttgtcacaaataagcgtgacact

SEQ ID NO: 358 - DNA, 2507 bp, Streptococcus pyogenes
  misc_feature 2475, 2486, 2502: n = A,T,C or G
agaatggcttatctttagaaggtgcttcaaccgaagcaaacgacccgaatgtaagagtaggtatcgtaaatcctaatgatactgttcaaacaataacacctactattaaacaagacgcagatggtaaagttaagaaccttgtttttactggcaggcttgggaaacaggtcataatagttagcacaactcgtctaaaagaagaacaaacgatctcattagattcttatggagaattagttattgatggagctgttgggctcagccagaaagataggcccccttacagcaagccaatcacagtaaatatcttaaaaccaaagttatcctcaattgaaagttcgcttgattctaaagattttgaaatcgttaaaacgattgataatctctacacttgggacgatcagttttatctcttggattttatttccaaacaatacgaagttttaaaaacggactaccaatcagctaaggatagcaccccacaaacacgagacattttatttggagaatacactgttgagcctttagtcatgaataaaggccataacaatacaattaacatttacattcgttcaacaaggccacttgggttaaaaccaataggagcagccccagcactaattcagccacgttcttttcgctccttaactcccagatcaactagaatgaagaggtctgccccagttgagaaattcgaaggtgaattggagcaccataagcggattgactatttaggagataatcaaaataatcctgataccaccatcgacgataaagaagacgaacatgacacctctgatctctatcgtctctatctggatatgacaggaaagaaaaatcccctagatattcttgttgttgtggataagtcagggagtatgcaggaagggataggatcggttcaaagatatagatactatgctcagagatgggatgattactatagtcaatgggtttatcatggaacttttgactattctagctatcaaggtgagtcttttaacagaggtcaaattcattatagatatagaggtattgtatctgtatctgatggtattagaagagatgatgcggtaaaaaattctcttctaggcgtaaatggattgttgcagagatttgttaatattaatccagaaaataaattatcagttattggctttcaaggcagtgctgattaccatgcaggaaaatggtatcctgatcaatccccacgtggtggattttatcagcctaatttaaataatagtagagatgctgaacttcttaagggatggtctactaattctttattagatcctaatactttgacagcattgcataacaatggtaaattatcatgctgctttattaaaagctaaagagattctaaatgaagtaaaagatgatggccgaagaaaaataatgatattcataagtgatggagttcccacgttttattttggagaagatggctatcgctcaggaaatggtagttcaaatgatcgtaataatgttacacgatcacaagaaggaagcaaacttgcaatagatgagtttaaggctagatatcctaacttgtcaatatattcattgggcgtttctaaagatattaatagtgatacggcaagttccagtcctgttgtcctaaaatacttgtcaggtgaggagcattactacggtattacggacacagcagaattagaaaaaactttgaataaaattgttgaggatagtaagttatctcagctaggaatttcggatagtttaagtcagtatgttgactactatgataaacaacctgatgtacttgttactagaaaatcgaaggttaatgatgaaacagagattttataccaaaaagaccaaaaagaccaagttcaagaagctggtaaagatatcattgataaagttgtatttaccccgaaaactactagtcaaccaaaaggtaaagttactttaacctttaagtctgattataaggttgatgatgaatatacctatacgctttcttttaatgtgaaagcttcagatgaagcctatgagaagtataaggataacgaaggaagatatagcgaaatgggagattccgatactgattatggaaccaaccaaactagttctggaaaaggtggtttgccttctaattcagatgcttcggttaattatatggcagatggtcgtgaacagaaattaccttataagcacccagtgattcaggtcaaaacagtaccaatcacgtttaccaaagtagatgctgacaacaaccagaaaaaacttgcaggtgttgagtttgaactccgtaaagaggacaagaagatcgtctgggaaaagggaacaacaggttcaaatggccaactcaactttaagtaccttcaaaaaggcaaaacctattatctgtatgagacgaaggcaaaacttggatacactcttccagaaaatccatgggaagttgccgttgctaacaacggtgatataaaagtaaaacacccgattganggtgaattgangtcaaaagatggctcntacat

SEQ ID NO: 359 - DNA, 1378 bp, Streptococcus pyogenes
  misc_feature 93, 375, 421: n = A,T,C or G
ccaacagtaacactttataaaataggagaaggtgtttacaacactaatggtgattcttttattaactttaaatatgctgagggggtttctttnactgaaacaggacctacatcacaagaaattactactattgcaaatggtattaatacgggtaaaataaagccttttagtactgaaaacgttagtatttctaatggaacagcaacttataatgcgagaggtgcatctgtttatattgcattattaacaggtgcgacagatggccgtacctacaatcctattttattagctgcatcttataatggtgagggaaatttagttactaaaaatattgattccaaatctaattatttatatggacaaacaagtgttgcnaaatcatcattaccatctattacaaagaaagtaaccgggacaatanatgacgtgaataaaaagactacctcgttaggaagtgtattgtcttattcgctgacatttgaattaccaagttataccaaagaagcagtcaataaaacagtatatgtttctgataatatgtcggaaggtcttacttttaactttaatagtcttacagtagaatggaaaggtaagatggctaatattactgaagatggttcagtaatggtagaaaatacaaaaatcggaatagctaaggaggttaataacggttttaatttaagttttatttatgatagtttagaatctatatcaccaaatataagttataaagctgttgtaaacaataaagctattgttggtgaagagggtaatcctaataaagctgaattcttctattcaaataatccaacaaaaggtaatacatacgataatttagataagaagcctgataaagggaatggtattacatccaaagaagattctaaaattgtttatacttatcaaatagcgtttagaaaagttgatagtgttagtaagaccccacttattggtgcaatttttggagtttatgatactagtaataaattaattgatattgttacaaccaataaaaatggatatgctatttcaacacaagtatcttcaggaaaatataaaattaaggaattaaaagctcctaaaggttattcattgaatacagaaacttatgaaattacggcaaattgggtaactgctacagtcaagacaagtgctaattcaaaaagtactacttatacatctgataaaaataaggcgacagataattcagagcaagtaggatggttaaaaaatggtatattctattctatagatagtagacctacaggaaatgatgttaaagaggcttatattgaatctactaaggctttaactgatggaacaactttctcaaaatcgaatgaaggttcaggtacagtattattagaaactgacatcc

SEQ ID NO: 360 - DNA, 2507 bp, Streptococcus pyogenes; identical to SEQ ID NO: 358
  misc_feature 2475, 2486, 2502: n = A,T,C or G

SEQ ID NO: 361 - DNA, 1378 bp, Streptococcus pyogenes; identical to SEQ ID NO: 359
  misc_feature 93, 375, 421: n = A,T,C or G

SEQ ID NO: 362 - DNA, 657 bp, Streptococcus pyogenes
gtaaggcgtataacgctaggcttgggattcagcccgttccagatgctttttcatttagggatggcattcatgataaaaactacgaaagcctacttcaaattgaaaacaatgatattatgggatatgttgaagtgccctctattaaagtgacgttacccatataccactatacgacagacgaggtgctaactaagggagcaggtcacttagttggaagtgccttaccagttggtggcgacgggactcacacggttatttctgctcatagaggccttccatcggcagaaatgtttactaatttgaatttagtgaaaaggggagatactttttactttcgtgtgttaaataaagtattggcttataaagttgatcagatactaactgttgaaccagatcaagtcacatctctttctggggtaatgggaaaagattatgctactctggttacctgcacaccatatggtgttaataccaagcgtctattggtcagaggtcatagaattgcatttcattacaaaaagtatcaacaggctaaaaaagcaatgaaactcgtggataaatcaagaatgtggacagaagtagtatgtgctgctttcggggtggttatagctattattttagtatttatgtattcaaagatgactgataaaaaagtga

SEQ ID NO: 363 - DNA, 604 bp, Streptococcus pyogenes
atgaataacaaaaaattgcaaaagaagcaagatgctcctcgggtatcaaacagaaagccaaaacaattaactgtcactttagtgggagtatttttaatgtttttgaccttggtaagttccatgagaggtgctcaaagcatatttggagaggaaaagagaattgaagaagtcagtgttcctaaaataaaaagtccagatgatgcctacccttggtatggctatgattcatatgactctagtcatccttactatgaacgttttaaagtagcacatgatttaaaagttaatttaaacggaagtaagagctaccaagtatattgtttcaacatcagttctcactacccagagaaaaaaaattattctactaaaaactggtttcagagagttgatgggacaggtgatgtattcacaagttatgctaaaacccctagagttagtggtgaagaattaaataagaaacttctaagtgttatgtataatgcttatcctaaaaatgctaatggttatatggataacatagaaccattaaatgcgattttagtaactcaatatgcggtttggtattactcagatagttcatcttatacagttaatacactttggg

SEQ ID NO: 364 - DNA, 699 bp, Streptococcus pyogenes
aaacttagagaagtatggctcccatggcttccatttttggaatcaagagctttagaagtgactcgagaattgatcgcgtatgctgaaaatgatgaggatgctaagattgaaagtctagacttctttattccaaataatagtagatatcagtctctggtagggacgcaatatcatcccgatgatttgactaatattattcgtatagaagacaaaaaactggtagctccagaggtgactcatagtttaactattaagaaaacagttgtaggtgagcttggtgataaggaaaaagaatttgaattctctattcgcttaacggatcgtaaaggtaaacctgtgactagtccaataatgagtaacaaggaaactgtcacgtgggataatggtactgctaaattcaaactaaaagatggagaatcaataacatttactgggctacctacggggtactattatgaaattactgaaactggtgctactgattatgagataagtgttaatggaaaaaatgcaccagatggaaaagcgacgaaagcctcagttaaggaagatgagactgtagcttttgaaaaccgaaaagatcttgtcccaccaactggtttgacaacagatggggctatctatctttggttgttattacttgttccacttgggttatgggtttggctaattggtcgtaagggactaaaaaatgactaa

SEQ ID NO: 365 - DNA, 498 bp, Streptococcus pyogenes
gggactcatattgattatcctctagttcagggaaaaacgaatttagagtatattaataaagcagttgatggcagtgttgccatgtctggtagtctatttttagatacacggaatcataatgattttacggacgattactctctgatttatggccatcatatggcaggtaatgccatgtttggcgaaattccaaaatttttaaaaaaggattttttcaacaaacataataaagctatcattgaaacaaaagagagaaaaaaactaaccgtcactatttttgcttgtctcaagacagatgcctttgaccagttagtttttaatcctaatgctattaccaatcaagaccaacaaaggcagcttgttgattatatcagtaaaagatcaaaacaatttaaacctgttaaattgaagcatcatacaaagttcgttgctttttcaacgtgtgaaaatttttctactgacaatcgtgttatcgttgtcggtactattcaagaataa

SEQ ID NO: 366 - DNA, 375 bp, Streptococcus pyogenes
tggtcaaactagcattagtgtcgaaaatgtcttagagagagcaggcgatagtaccccattttcggttgcattagaatcaattgatgcgatgaaaacaatagacgaaataacaattgctggttctggaaaagcaagcttttcccctctgaccttcacaacagttgggcaatatacttatcgtgtttatcagaagccttcacaaaataaagattatcaagcagatactactgtatttgacgttcttgtctatgtgacctatgatgaagatgggactctagtcgcaaaagttatttctcgaagggctggagacgaagaaaaatcagcgattactttaagcccaaacggttagaaaaccaataccgcctagacacctac

SEQ ID NO: 367 - DNA, 667 bp, Streptococcus pyogenes
gtggaatgcctatcgtgatcgtcaattgttatcaacttatcacaaacaagtgactcaaaagaagccctcagaaatggaggaggtgtggcaaaaggctaaggcgtataacgctaggcttgggattcagcccgttccagatgctttttcatttagggatggcattcatgataaaaactacgaaagcctacttcaaattgaaaacaatgatattatgggatatttggaagtgccttaccagttggtggcgacgggactcacacggttatttctgctcatagaggccttccatcggcagaaatgtttactaatttgaatttagtgaaaaggggagatactttttacttttgtgtgttaaataaagtattggcttataaagttgatcagatactaactgttgaaccagatcaagtcacatctctttctggggtaatgggaaaagattatgctactctggttacctgcacaccatatggtgttaataccaagcgtctattggtcagaggtcatagaattgcatatcattacaaaaagtatcaacaggctaaaaaagcaatgaaactcgtggataaatcaagaatgtggacagaagtagtatgtgctgctttcggggtggttatagctattattttagtatttatgtattcaaagatgactgataaaaaagtga

SEQ ID NO: 368 - DNA, 2315 bp, Streptococcus pyogenes
atgaaatagcattgtgactgtccggtaaagggatgggactgaagattttattcagaaggagagggaatgaataacaaaaaattgcaaaagaagcaagatgctcctcgggtatcaaacagaaagccaaaacaattaactgtcactttagtgggagtatttttaatgctcctagtattgataggatttgaaggaaaagttcgagcagctcacgaattggttgaggtaccagtacctatttttcacaatccagatccacagtcagactatcagtggtatggctatgaagcctatacaggggggtatccgaagtatgatttattcaagacatactatcatgatctgagagtgaatttgcatgggagtaaaagttatcaagtatattgctttaacgttcacaaacactatcctcgttcctcccagagttttgatcggaagtggtataaaaaattagatggaactgctgagaattttgattctcttgctatggaaccaagagttcgtaaagaggagttaaccaaaaaactccgagctgttatgtataatgcctatcctaatgatgctaatggcattatgaaagatttagagcctttaaatgctattaaagtcactcaagaggctgtatggtactattctgattcagctcaaattaatccggatgaaagttttaaaacagaagctcaaagtaatggtattaatgaccagcagttaggcttaatgcgaaaagctttaaaagaactaattgatccaaacttagggtcaaaatattcgaataaaactccatcaggttatcggttaaatgtatttgaatctcatgataagactttccaaaatcttttgagtgctgagtatgttccggatactcccccaaaaccaggagaagagcctccggctaaaactgaaaaaacatcagtcattatcagaaaatatgcggaaggtgactactctaaacttctagagggagcaactttgcgtttaacaggggaagatatcccagattttcaagaaaaagtcttccaaagtaatggaacaggagaaaagattgaattatcaaatgggacttataccttaacagaaacatcatctccagatggatataaaattgcggagccgattaagtttagagtagtgaataaaaaagtatttatcgtccaaaaagatggttctcaagtggaaaatccaaacaaagaagtaggttctccatatactatagaggcatacaatgattttgatgaatttggcttactgtcaacacaaaattatgcgaaattttattatggaaaaaactatgatggcagttcacaaattgtttattgcttcaatgccaacttgaaatccccacctgactcggaagatcatggtgctacaataaatcctgactttacgactggtgatattaggtatagtcatattgctggttcagatttgataaaatacgctaatacagctagggatgaagatcctcaattatttttaaaacacgtaaaaaaagtaattgaaaatgggtatcataaaaaaggtcaagctattccatataacggtctgactgaggcacagtttcgcgcggctactcaactggcaatttattattttacagatagtgttgacttaactaaggatagattgaaagacttccatggatttggagatatgaatgatcaaactttgggtgtagctaaaaaaattgtagaatacgctttgagtgatgaagattcaaaactaacaaatcttgatttcttcgtacctaataatagcaaataccaatctcttattgggacagaataccatccagatgatttggttgacgtgattcgtatggaagataaaaagcaagaagttattccagtaactcatagtttgacggtgaaaaaaacagtagtcggtgagttgggagataagactaaaggcttccaatttgaacttgagttgaaagataaaactggacagcctattgtcgacgctctaaaaactaataatcaagatttagtagctaaagatgggaaatattcatttaatctaaagcatggtgacaccataagaatagaaggattaccgacgggatattcttatactctgaaagagactgaagctaaggattatatagtaaccgttgataacaaagttagtcaagaagctcaatcagcaagtgagaatgtcacagcagacaaagaagtcacttttgaaaaccgaaaagatcttgtcccaccaactggtttgacaacagatggggctatctatactttggttgttatttcttgttccatttgggttattggtttggctatttggtcgtaaagggactaaaaaatgactaatta

SEQ ID NO: 369 - DNA, 160 bp, Streptococcus pyogenes
atgaaaaaaaacaaattattacttgcaagtacaattttggctactgctttgggaatgaataatttagcatcagctgaagtaaattatgtaaaatcaggagttattgatggtgcaaagttagaaatccataaaacaattaagaattatgatgatgataaag

SEQ ID NO: 370 - DNA, 776 bp, Streptococcus pyogenes
  misc_feature 260, 317, 329, 368, 369, 370, 371, 372, 389, 564: n = A,T,C or G
ctagtaaggaagtatcttatacaaatagcgacaaaccaaatagtaaagataaatatacttactttgatttttctcaagtgaaatttactaatgttggtatctatcgctatattgttgaagaagtacaggatacagtatccggtattcattatgatagtcaaaaatggtatatagacgtttatgttgttgaaggagataatggattcgttccgaaatatattgtatcaagtaaagcattggaaactaaagaaccagttttntttagtaattcatttgatacaacttctttagttgttaaaaaagaggttacaggaaanactggagataanacgaaaaactttaaattccaattattattaaaagagaannnnnatttctcagcaggtcanaaagtttcagttacaataacttctgagaaagcttcagaagtcacgactgctaccataggtcaaccacttatctttgagttaaaacacaatgaacaacttaaattggataaattgcctgttggtattacgtatcaaattgatgaaactagtaaaaatagtgacagctactcaacgnctgctacaattcaagaaggtgaacaatcacaaaattcttatgttttaaactcagataaggaaactgataaaagtccagatattattacagtcacaaataagcgtgacactcaagttccaactggtgttgtaggcacccttgctccatttgcagttcttagcattgtggctattggtggagttatctatattacaaaacgtaaaaaagcttaa

SEQ ID NO: 371 - DNA, 631 bp, Streptococcus pyogenes
gtgggattcttatcatctctatcaacaagcagacgcttctaatttcaaaaaatttaaaacagctcaacaacagcctaaatttgaagacttgttagctttgaatgaggatgtcattggttggttaaatatcccagggactcatattgattatcctctagttcagggaaaaacgaatttagagtatattaataaagcagttgatggcagtgttgccatgtctggtagtttatttttagatacacggaatcataatgattttacggacgattactctctgatttatggccatcatatggcaggtaatgccatgtttggcgaaattccaaaatttttaaaaaaggattttttcaacaaacataataaagctatcattgaaacaaaagagagaaaaaaactaaccgtcactatttttgcttgtctcaagacagatgcctttgaccagttagtttttaatcctaatgctattaccaatcaagaccaacaaaggcagcttgttgattatatcagtaaaagatcaaaacaatttaaacctgttaaattgaagtatcatacaaagttcgttgctttttcaacgtgtgaaaatttttctactgacaatcgtgttatcgttgtcggtactattcaagaataa

SEQ ID NO: 372 - DNA, 386 bp, Streptococcus pyogenes
aaagacagcactgttcaaactagcattagtgtcgaaaatgtcttagagagagcaggcgatagtaccccattttcgattgcattagaatcaattgatgcgatgaaaacaatagaagaaataacaattgctggttctggaaaagcgagcttttcccctctgaccttcacaacagttgggcaatatacttatcgtgtttatcagaagccttcacaaaataaagattatcaagcagatactactgtatttgacgttcttgtctatgtgacctatgatgaagatgggactctagtcgcaaaagttatttctcgaagggctggagacgaagaaaaatcagcgattactttaagcccaaacggttagaaaaccaataccgccagacaaccgca

SEQ ID NO: 373 - DNA, 1562 bp, Streptococcus pyogenes
cgttatgggcatctgagcttaaagacggaaaaatagattttgaacaagtaaaattaatgcgtgaagcttactcaaaactaattagtgatgatttagaagaaacatctaaaaataagctacctcaaggatctaaactgaatatttttgttccgcaagataaatctgttcaaaatttattaagtgcagagtacgtgcctgaatcccctccggcaccaggtcagtctccagaaccgccagtgcaaacaaaaaaaacatcagtcattatcagaaaatatgcggaaggtgactactctaaacttctagagggagcaactttgcgtttaacaggggaagatatcctagattttcaagaaaaagtcttccaaagtaatggaacaggagaaaagattgaattatcaaatgggacttataccttaacagaaacatcatctccagatggatataaaattgcggagccgattaagtttagagtagtgaataaaaaagtatttatcgtccaaaaagatggttctcaagtggaaaatccaaacaaagaagtagcagagccatactcagtggaagcgtacagcgatatgcaagatagtaactatattaatccagaaacgttcactccttatgggaaattttattacgctaaaaataaggataaaagttcacaagttgtctactgttttaatgctgatttacactctccacctgaatcagaggatgggggaggaactatagatcctgatattagtacgatgaaagaagtcaagtacacacatacggcaggtagtgatttgtttaaatacgcgctaagaccgagagatacaaatccagaagacttcttaaagcacattaaaaaagtaattgaaaaaggctacaataaaaaaggtgatagctataatggattaacagaaacacagtttcgcgcggctactcagcttgctatctattactttacagacagcactgacttaaaaaccttaaaaacttataacaatgggaaaggttaccatggatttgaatctatggatgaaaaaaccctagctgtaacaaaagaattaattaattacgctcaagataatagtgcccctcaactaacaaatcttgatttcttcgtacctaataatagcaaataccaatctcttattgggacagaataccatccagatgatttggttgacgtgattcgtatggaagataaaaagcaagaagttattccagtaactcacagtttgacagtgaaaaaaacagtagtcggtgagttgggagataaaactaaaggcttccaatttgaacttgagttgaaagataaaactggacagcctattgttaacactctaaaaactaataatcaagatttagtagctaaagatgggaaatattcatttaatctaaagcatggtgacaccataagaatagaaggattaccgacgggatattcttatactctgaaagagactgaagctaaggattatatagtaaccgttgataacaaagttagtcaagaagctcaatcagcaagtgagaatgtcacagcagacaaagaagtcacttttgaaaaccgtaaagatctt

SEQ ID NO: 374 - DNA, 847 bp, Streptococcus pyogenes
gctagcgagacggcaggggttgttagcagtggtcaattaacaataaaaaaatcaattacaaattttaatgatgatacacttttgatgcctaagacagactatacttttagcgttaatccggatagtgcggctacaggtactgaaagtaatttaccaattaaaccaggtattgctgttaacaatcaagatattaaggtttcttattctaatactgataagacatcaggtaaagaaaaacaagttgttgttgactttatgaaagttacttttcctagcgttggtatttaccgttatgttgttaccgagaataaagggacagcagaaggagttacatatgatgatacaaaatggttagttgacgtctatgttggtaataatgaaaagggaggtcttgaaccaaagtatattgtatctaaaaaaggagattctgctactaaagaaccaatccagtttaataattcattcgaaacaacgtcattaaaaattgaaaaggaagttactggtaatacaggagatcataaaaaagcatttaactttacattaacattgcaaccaaatgaatactatgaggcaagttcggttgtgaaaattgaagagaacggacaaacgaaagatgtgaaaattggggaggcatataagtttactttgaacgatagtcagagtgtgatattgtctaaattaccagttggtattaattataaagttgaagaagcagaagctaatcaaggtggatatactacaacagcaactttaaaagatggagaaaagttatctacttataacttaggtcaggaacataaaacagacaagactgctgatgaaatcgttgtcacaaataaccgtgaca

SEQ ID NO: 375 - DNA, 357 bp, Streptococcus pyogenes
  misc_feature 4, 6: n = A,T,C or G
aaananagcactgttcaaactagcattagtgtcgaaaatgtcttagagagagcaggcgatagtaccccattttcgattgcattagaatcaattgatgcgatgaaaacaatagaagaaataacaattgctggttctggaaaagcaagcttttcccctctgaccttcacaacagttgggcaatatacttatcgtgtttatcagaagccttcacaaaataaagattatcaagcagatactactgtatttgacgttcttgtctatgtgacctatgatgaagatgggactctagtcgcaaaagttatttctcgaagggctggagacgaagaaaaatcagcgattacttttaagcccaaacgg

SEQ ID NO: 376 - DNA, 2004 bp, Streptococcus pyogenes
gaaagagaattgaagaagtcagtgttcctaaaataaaaagtccagatgatgcctacccttggtatggctatgattcatatgactctagtcatccttactatgaacgttttaaagtagcacatgatttaagggttaatttaaatggaagtaagagctaccaagtatattgctttaatatcaattctcattatccgaatagaaaaaatgctttttctaaacaatggtttaagagagttgatgggacaggtgatgtgttcacaaattatgctcagacacctaagattcgtggagaatcattgaataataaacttttaagtattatgtacaacgcttatcctaaaaatgctaatggctatatggataagatagaaccattaaatgctattttagtaactcaacaagctgtttggtactattctgacagttcttatggtaatataaaaacgttatgggcatctgagcttaaagacggaaaaatagattttgaacaagtaaaattaatgcgtgaagcttactcaaaactaattagtgatgatttagaagaaacatctaaaaataagctacctcaaggatctaaactgaatatttttgttccgcaagataaatctgttcaaaatttattaagtgcagagtacgtgcctgaatcccctccggcaccaggtcagtctccagaaccgccagtgcaaacaaaaaaaacatcagtcattatcagaaaatatgcggaaggtgactactctaaacttctagagggagcaactttgcgtttaacaggggaagatatcctagattttcaagaaaaagtcttccaaagtaatggaacaggagaaaagattgaattatcaaatgggacttataccttaacagaaacatcatctccagatggatataaaattgcggagccgattaagtttagagtagtgaataaaaaagtatttatcgtccaaaaagatggttctcaagtggaaaatccaaacaaagaagtagcagagccatactcagtggaagcgtacagcgatatgcaagatagtaactatattaatccagaaacgttcactccttatgggaaattttattacgctaaaaataaggataaaagttcacaagttgtctactgttttaatgctgatttacactctccacctgaatcagaggatgggggaggaactatagatcctgatattagtacgatgaaagaagtcaagtacacacatacggcaggtagtgatttgtttaaatacgcgctaagaccgagagatacaaatccagaagacttcttaaagcacattaaaaaagtaattgaaaaaggctacaataaaaaaggtgatagctataatggattaacagaaacacagtttcgcgcggctactcagcttgctatctattactttacagacagcactgacttaaaaaccttaaaaacttataacaatgggaaaggttaccatggatttgaatctatggatgaaaaaaccctagctgtaacaaaagaattaattaattacgctcaagataatagtgcccctcaactaacaaatcttgatttcttcgtacctaataatagcaaataccaatctcttattgggacagaataccatccagatgatttggttgacgtgattcgtatggaagataaaaagcaagaagttattccagtaactcacagtttgacagtgaaaaaaacagtagtcggtgagttgggagataaaactaaaggcttccaatttgaacttgagttgaaagataaaactggacagcctattgttaacactctaaaaactaataatcaagatttagtagctaaagatgggaaatattcatttaatctaaagcatggtgacaccataagaatagaaggattaccgacgggatattcttatactctgaaagagactgaagctaaggattatatagtaaccgttgataacaaagttagtcaagaagctcaatcagcaagtgagaatgtcacagcagacaaagaagtcacttttgaaaaccgtaagatct

SEQ ID NO: 377 - DNA, 803 bp, Streptococcus pyogenes; identical to SEQ ID NO: 257

SEQ ID NO: 378 - DNA, 1994 bp, Streptococcus pyogenes
gaaagagaattgaagaagtcagtgttcctaaaataaaaagtccagatgatgcctacccttggtatggctatgattcatatgactctagtcatccttactatgaacgttttaaagtagcacatgatttaagggttaatttaaatggaagtaagagctaccaagtatattgctttaatatcaattctcattatccgaatagaaaaaatgctttttctaaacaatggtttaagagagttgatgggacaggtgatgtgttcacaaattatgctcagacacctaagattcgtggagaatcattgaataataaacttttaagtattatgtacaacgcttatcctaaaaatgctaatggctatatggataagatagaaccattaaatgctattttagtaactcaacaagctgtttggtactattctgacagttcttatggtaatataaaaacgttatgggcatctgagcttaaagacggaaaaatagattttgaacaagtaaaattaatgcgtgaagcttactcaaaactaattagtgatgatttagaagaaacatctaaaaataagctacctcaaggatctaaactgaatatttttgttccgcaagataaatctgttcaaaatttattaagtgcagagtacgtgcctgaatcccctccggcaccaggtcagtctccagaaccgccagtgcaaacaaaaaaaacatcagtcattatcagaaaatatgcggaaggtgactactctaaacttctagagggagcaactttgcgtttaacaggggaagatatcctagattttcaagaaaaagtcttccaaagtaatggaacaggagaaaagattgaattatcaaatgggacttataccttaacagaaacatcatctccagatggatataaaattgcggagccgattaagtttagagtagtgaataaaaaagtatttatcgtccaaaaagatggttctcaagtggaaaatccaaacaaagaagtagcagagccatactcagtggaagcgtacagcgatatgcaagatagtaactatattaatccagaaacgttcactccttatgggaaattttattacgctaaaaataaggataaaagttcacaagttgtctactgttttaatgctgatttacactctccacctgaatcagaggatgggggaggaactatagatcctgatattagtacgatgaaagaagtcaagtacacacatacggcaggtagtgatttgtttaaatacgcgctaagaccgagagatacaaatccagaagacttcttaaagcacattaaaaaagtaattgaaaaaggctacaataaaaaaggtgatagctataatggattaacagaaacacagtttcgcgcggctactcagcttgctatctattactttacagacagcactgacttaaaaaccttaaaaacttataacaatgggaaaggttaccatggatttgaatctatggatgaaaaaaccctagctgtaacaaaagaattaattaattacgctcaagataatagtgcccctcaactaacaaatcttgatttcttcgtacctaataatagcaaataccaatctcttattgggacagaataccatccagatgatttggttgacgtgattcgtatggaagataaaaagcaagaagttattccagtaactcacagtttgacagtgaaaaaaacagtagtcggtgagttgggagactaaaggcttccaatttgaacttgagttgaaagataaaactggacagcctattgttaacactctaaaaactaataatcaagatttagtagctaaagatgggaaatattcatttaatctaaagcatggtgacaccataagaatagaaggattaccgacgggatattcttatactctgaaagagactgaagctaaggattatatagtaaccgttgataacaaagttagtcaagaagctcaatcagcaagtgagaatgtcacagcagacaaagaagtcacttttgaaaaccgtaa

SEQ ID NO: 379 - DNA, 803 bp, Streptococcus pyogenes; identical to SEQ ID NO: 257

SEQ ID NO: 380 - DNA, 2213 bp, Streptococcus pyogenes
atgaaatagcattgtgactgtccggtaaagggatgggactgaagattttattcagaaggagagggaatgaataacaaaaaattgcaaaagaagcaagatgctcctcgggtatcaaacagaaagccaaaacaattaactgtcactttagtgggagtatttttaatgctcttagtattgataggatttgaaggaaaagttcgagcagctcacgaattggttgaggtaccagtacctatttttcacaatccagatccacagtcagactatcagtggtatggctatgaagcctatacaggggggtatccgaagtatgatttattcaagacatactatcatgatctgagagtgaatttgcatgggagtaaaagttatcaagtatattgctttaacgttcacaaacactatcctcgttcctcccagagttttgatcggaagtggtataaaaaattagatggaactgctgagaattttgattctcttgctatggaaccaagagttcgtaaagaggagttaaccaaaaaactccgagctgttatgtataatgcctatcctaatgatgctaatggcattatgaaagatttagagcctttaaatgctattaaagtcactcaagaagctgtatggtactattcggacaattctcctattaacccagatgaaagttttaaatctgaagctctggctaataaaattagtgctacacaaatatctttaatgagagaggctttgaagcaacttattgctcctgatttagatgagaagcaatctaggagagttcctgatggatatcagttgagtatttttgaatctgagaataaggattatcaaaatcttttggctgcagaagaggttcctattcaacctccaaaaccgggggataagccaccactaccgccagtgcaaacaaaaaaaacatcagtcattatcagaaaatatgcggaaggtgactactctaaacttctagagggagcaaccttaaagcttgctcaaattgaaggaagtggttttcaggagaaaatttttgatagtaacaaatctggagagaaagtagagctacctaatgggacttacgttttaagtgagctaaaacctcctcaaggatatagatttgccacacccattacttttaaagttgcagctgggaaagttttaataaaaaataaagaaggtcaatttgtagagaaccaaaataaggaaatcgcagagccatattctgtaacagctttcaatgactttgaagagattggttatttatctgattttaataactatggtaaattttactatgcaaaaaatactaatggaactagtcaagttgtctactgtttcaatgctgatttacactcaccacctgactcatatgatagtggtgagactataaatccagatactagtacgatgaaagaagtcaagtacacacatacggcaggtggtgatttgtttaaatacgcgctaagaccgagagatacaaatccagaagacttcctaaagcatattaaaaaagtaattgaaaaaggctacaagaaaaaaggtaatagctataatggattaacagaaacacagtttcgcgcggctactcagcttgctatctattactttacagacagcactgacttaaaaaccttaaaaacttataacaatgggaaaggttaccatggatttgaatctgtggatgaaaaaaccctagctgtcacaaaagaattaattacttatgctcaaaatggcagtgcccctcaactaacaaatcttgatttcttcgtacctaataatagcaaataccaatctcttattgggacagaataccatccagatgatttggttgacgtgattcgtatggaagataaaaagcaagaagttattccagtaactcacagtttgacagtgaaaaaaacagtagtcggtgagttgggagataaaactaaaggcttccaatttgaacttgagttgaaagataaaactggacagcctattgttaacactctaaaaactaataatcaagatttagtagctaaagatgggaaatattcatttaatctaaagcatggtgacaccataagaatagaaggattaccgacgggatattcttatactctgaaagagactgaagctaaggattatatagtaaccgttgataacaaagttagtcaagaagctcaatcagcaagtgagaatgtcacagcagacaaagaagtcacttttgaaaaccgtaaaga

SEQ ID NO: 381 - DNA, 431 bp, Streptococcus pyogenes
atgaaaaaaaataaattattacttgctactgcaatcttagcaactgctttaggaacagcttctttaaatcaaaacgtaaaagctgagacggcaggggttgttagcagtggtcaattaacaataaaaaaatcaattacaaattttaatgatgatacacttttgatgcctaagacagactatacttttagcgttaatccggatagtgcggctacaggtactgaaagtaatttaccaattaaaccaggtattgctgttaacaatcaagatattaaggtttcttattctaatactgataagacatcaggtaaagaaaaacaagttgttgttgactttatgaaagttacttttcctagcgttggtatttaccgttatgttgttaccgagaataaagggacagcagaaggagttacatatgatgatacaaaatggtt

SEQ ID NO: 382 - DNA, 493 bp, Streptococcus pyogenes
ttcattcgaaacaacgtcattaaaaattgaaaagaaagttactggtaatacaggagatcataaaaaagcatttaactttacattaacattgcaaccaaatgaatactatgaggcaagttcggttgtgaaaattgaagagaacggacaaacgaaagatgtgaaaattggggaggcatataagtttactttgaacgatagtcagagtgtgatattgtctaaattaccagttggtattaattataaagttgaagaagcagaagctaatcaaggtggatatactacaacagcaactttaaaagatggagaaaagttatctacttataacttaggtcaggaacataaaacagacaagactgctgatgaaatcgttgtcacaaataagcgtgacactcaagttccaactggtgttgtaggcacccttgctccatttgcagttcttagcattgtggctattggtggagttatctatattacaaaacgtaaaaaagcttaa

SEQ ID NO: 383 - DNA, 272 bp, Streptococcus pyogenes
  misc_feature 195: n = A,T,C or G
atgacaattgtacaggttatcaataaagccattgatactctcattcttatcttttgtttagtcgtactatttttagctggttttggtttgtgggattcttatcatctctatcaacaagcagacgcttctaatttcaaaaaatttaaaacagctcaacaacagcctaaatttgaagacttgttagctttgaatgangatgtcattggttggttaaatatcccagggactcatattgattatcctctagttcagggaaaaacgaatttagagta

SEQ ID NO: 384 - DNA, 401 bp, Streptococcus pyogenes
aagacagcactgttcaaactagcattagtgtcgaaaatgtcttagagagagcaggcgatagtaccccattttcgattgcattagaatcaattgatgcgatgaaaacaatagaagaagtaacaattgctggttctggaaaagcaagcttttcccctctgaccttcacaacagttgggcaatatacttatcgtgtttatcagaagccttcacaaaataaagattatcaagcagatactactgtatttgacgttcttgtttatgtgacctatgatgaagatgggactctagtcgcaaaagttatttctcgaagggctggagacgaagaaaaatcagcgattacttttaagcccaaacggttagtaaaaccaataccgcctagacaacctgacatccctaaaacc

SEQ ID NO: 385 - DNA, 2151 bp, Streptococcus pyogenes
atgaataacaaaaaattgcaaaagaagcaagatgctcctcgggtatcaaacagaaagccaaaacaattaactgtcactttagtgggagtatttttaatgctcttagtattgataggatttgaaggaaaagttcgagcagctcacgaattggttgaggtaccagtacctatttttcacaatccagatccacagtcagactatcagtggtatggctatgaagcctatacaggggggtatccgaagtatgatttattcaagacatactatcatgatctgagagtgaatttgcatgggagtaaaagttatcaagtatattgctttaacgttcacaaacactatcctcgttcctcccagagttttgatcggaagtggtataaaaaattagatggaactgctgagaattttgattctcttgctatggaaccaagagttcgtaaagaggagttaaccaaaaaactccgagctgttatgtataatgcctatcctaatgatgctaatggcattatgaaagatttagagcctttaaatgctattaaagtcactcaagaagctgtatggtactattcggacaattctcctattaacccagatgaaagttttaaatctgaagctctggctaataaaattagtgctacacaaatatctttaatgagagaggctttgaagcaacttattgctcctgatttagatgagaagcaatctaggagagttcctgatggatatcagttgagtatttttgaatctgagaataaggattatcaaaatcttttggctgcagaagaggttcctattcaacctccaaaaccgggggataagccaccactaccgccagtgcaaacaaaaaaaacatcagtcattatcagaaaatatgcggaaggtgactactctaaacttctagagggagcaaccttaaagcttgctcaaattgaaggaagtggttttcaggagaaaatttttgatagtaacaaatctggagagaaagtagagctacctaatgggacttacgttttaagtgagctaaaacctcctcaaggatatagatttgccacacccattacttttaaagttgcagctgggaaagttttaataaaaaataaagaaggtcaatttgtagagaaccaaaataaggaaatcgcagagccatattctgtaacagctttcaatgactttgaagagattggttatttatctgattttaataactatggtaaattttactatgcaaaaaatactaatggaactagtcaagttgtctactgtttcaatgctgatttacactcaccacctgactcatatgatagtggtgagactataaatccagatactagtacgatgaaagaagtcaagtacacacatacggcaggtggtgatttgtttaaatacgcgctaagaccgagagatacaaatccagaagacttcctaaagcatattaaaaaagtaattgaaaaaggctacaagaaaaaaggtgatagctataatggattaacagaaacacagtttcgcgcggctactcagcttgctatctattactttacagacagcactgacttaaaaaccttaaaaacttataacaatgggaaaggttaccatggatttgaatctgtggatgaaaaaaccctagctgtcacaaaagaattaattacttatgctcaaaatggcagtgcccctcaactaacaaatcttgatttcttcgtacctaataatagcaaataccaatctcttattgggacagaataccatccagatgatttggttgacgtgattcgtatggaagataaaaagcaagaagttattccagtaactcacagtttgacagtgaaaaaaacagtagtcggtgagttgggagataaaactaaaggcttccaatttgaacttgagttgaaagataaaactggacagcctattgttaacactctaaaaactaataatcaagatttagtagctaaagatgggaaatattcatttaatctaaagcatggtgacaccataagaatagaaggattaccgacgggatattcttatactctgaaagagactgaagctaaggattatatagtaaccgttgataacaaagttagtcaagaagctcaatcagcaagtgagaatgtcacagcagacaaagaagtcacttttgaaaaccgtaaagactct

SEQ ID NO: 386 - DNA, 1029 bp, Streptococcus pyogenes
atgaaaaaaaataaattattacttgctactgcaatcttagcaactgctttaggaacagcttctttaaatcaaaacgtaaaagctgagacggcaggggttgttagcagtggtcaattaacaataaaaaaatcaattacaaattttaatgatgatacacttttgatgcctaagacagactatacttttagcgttaatccggatagtgcggctacaggtactgaaagtaatttaccaattaaaccaggtattgctgttaacaatcaagatattaaggtttcttattctaatactgataagacatcaggtaaagaaaaacaagttgttgttgactttatgaaagttacttttcctagcgttggtatttaccgttatgttgttaccgagaataaagggacagcagaaggagttacatatgatgatacaaaatggttagttgacgtctatgttggtaataatgaaaagggaggtcttgaaccaaagtatattgtatctaaaaaaggagattctgctactaaagaaccaatccagtttaataattcattcgaaacaacgtcattaaaaattgaaaagaaagttactggtaatacaggagatcataaaaaagcatttaactttacattaacattgcaaccaaatgaatactatgaggcaagttcggttgtgaaaattgaagagaacggacaaacgaaagatgtgaaaattggggaggcatataagtttactttgaacgatagtcagagtgtgatattgtctaaattaccagttggtattaattataaagttgaagaagcagaagctaatcaaggtggatatactacaacagcaactttaaaagatggagaaaagttatctacttataacttaggtcaggaacataaaacagacaagactgctgatgaaatcgttgtcacaaataagcgtgacactcaagttccaactggtgttgtaggcacccttgctccatttgcagttcttagcattgtggctattggtggagttatctatattacaaaacgtaaaaaagcttaa

SEQ ID NO: 387 - DNA, 285 bp, Streptococcus pyogenes
  misc_feature 240: n = A,T,C or G
atgatgatgacaattgtacaggttatcaataaagccattgatactctcattcttatcttttgtttagtcgtactatttttagctggttttggtttgtgggattcttatcatctctatcacaagcagacgcttctaatttcaaaaaatttaaaacagctcaacaacagcctaaatttgaagacttgttagctttgaatgaggatgtcattggttggttaaatatcccagggactcatattngattatcttctagttcagggaaaaacgaatttagagtatattaat

SEQ ID NO: 388 - DNA, 405 bp, Streptococcus pyogenes
aaagacagcactgttcaaactagcattagtgtcgaaaatgtcttagagagagcaggcgatagtaccccattttcgattgcattagaatcaattgatgcgatgaaaacaatagaagaagtaacaattgctggttctggaaaagcaagcttttcccctctgaccttcacaacagttgggcaatatacttatcgtgtttatcagaagccttcacaaaataaagattatcaagcagatactactgtatttgacgttcttgtttatgtgacctatgatgaagatgggactctagtcgcaaaagttatttctcgaagggctggagacgaagaaaaatcagcgattacttttaagcccaaacggttagtaaaaccaataccgcctagacaacctgacatccctaaaaccaca

SEQ ID NO: 389 - DNA, 2147 bp, Streptococcus pyogenes
atgaataacaaaaaattgcaaaagaagcaagatgctcctcgggtatcaaacagaaagccaaaacaattaactgtcactttagtgggagtatttttaatgctcttagtattgataggatttgaaggaaaagttcgagcagctcacgaattggttgaggtaccagtacctatttttcacaatccagatccacagtcagactatcagtggtatggctatgaagcctatacaggggggtatccgaagtatgatttattcaagacatactatcatgatctgagagtgaatttgcatgggagtaaaagttatcaagtatattgctttaacgttcacaaacactatcctcgttcctcccagagttttgatcggaagtggtataaaaaattagatggaactgctgagaattttgattctcttgctatggaaccaagagttcgtaaagaggagttaaccaaaaaactccgagctgttatgtataatgcctatcctaatgatgctaatggcattatgaaagatttagagcctttaaatgctattaaagtcactcaagaagctgtatggtactattcggacaattctcctattaacccagatgaaagttttaaatctgaagctctggctaataaaattagtgctacacaaatatctttaatgagagaggctttgaagcaacttattgctcctgatttagatgagaagcaatctaggagagttcctgatggatatcagttgagtatttttgaatctgagaataaggattatcaaaatcttttggctgcagaagaggttcctattcaacctccaaaaccgggggataagccaccactaccgccagtgcaaacaaaaaaaacatcagtcattatcagaaaatatgcggaaggtgactactctaaacttctagagggagcaaccttaaagcttgctcaaattgaaggaagtggttttcaggagaaaatttttgatagtaacaaatctggagagaaagtagagctacctaatgggacttacgttttaagtgagctaaaacctcctcaaggatatagatttgccacacccattacttttaaagttgcagctgggaaagttttaataaaaaataaagaaggtcaatttgtagagaaccaaaataaggaaatcgcagagccatattctgtaacagctttcaatgactttgaagagattggttatttatctgattttaataactatggtaaattttactatgcaaaaaatactaatggaactagtcaagttgtctactgtttcaatgctgatttacactcaccacctgactcatatgatagtggtgagactataaatccagatactagtacgatgaaagaagtcaagtacacacatacggcaggtggtgatttgtttaaatacgcgctaagaccgagagatacaaatccagaagacttcctaaagcatattaaaaaagtaattgaaaaaggctacaagaaaaaaggtaatagctataatggattaacagaaacacagtttcgcgcggctactcagcttgctatctattactttacagacagcactgacttaaaaaccttaaaaacttataacaatgggaaaggttaccatggatttgaatctgtggatgaaaaaaccctagctgtcacaaaagaattaattacttatgctcaaaatggcagtgcccctcaactaacaaatcttgatttcttcgtacctaataatagcaaataccaatctcttattgggacagaataccatccagatgatttggttgacgtgattcgtatggaagataaaaagcaagaagttattccagtaactcacagtttgacagtgaaaaaaacagtagtcggtgagttgggagataaaactaaaggcttccaatttgaacttgagttgaaagataaaactggacagcctattgttaacactctaaaaactaataatcaagatttagtagctaaagatgggaaatattcatttaatctaaagcatggtgacaccataagaatagaaggattaccgacgggatattcttatactctgaaagagactgaagctaaggattatatagtaaccgttgataacaaagttagtcaagaagctcaatcagcaagtgagaatgtcacagcagacaaagaagtcacttttgaaaaccgtaaaga

SEQ ID NO: 390 - DNA, 1029 bp, Streptococcus pyogenes; identical to SEQ ID NO: 386

SEQ ID NO: 391 - DNA, 288 bp, Streptococcus pyogenes
  misc_feature 198: n = A,T,C or G
atgatgacaattgtacaggttatcaataaagccattgatactctcattcttatcttttgtttagtcgtactatttttagctggttttggtttgtgggattcttatcatctctatcaacaagcagacgcttctaatttcaaaaaatttaaaacagctcaacaacagcctaaatttgaagacttgttagctttgaatgangatgtcattggttggttaaatatcccagggactcatattgattatcctctagttcagggaaaaacgaatttagagtatattaataaagca

SEQ ID NO: 392 - DNA, 402 bp, Streptococcus pyogenes
aagacagcactgttcaaactagcattagtgtcgaaaatgtcttagagagagcaggcgatagtaccccattttcgattgcattagaatcaattgatgcgatgaaaacaatagaagaagtaacaattgctggttctggaaaagcaagcttttcccctctgaccttcacaacagttgggcaatatacttatcgtgtttatcagaagccttcacaaaataaagattatcaagcagatactactgtatttgacgttcttgtttatgtgacctatgatgaagatgggactctagtcgcaaaagttatttctcgaagggctggagacgaagaaaaatcagcgattacttttaagcccaaacggttagtaaaaccaataccgcctagacaacctgacatccctaaaaccc

SEQ ID NO: 393 - DNA, 1647 bp, Streptococcus pyogenes
  misc_feature 40, 76, 289, 1520, 1641, 1642, 1643, 1644, 1645, 1646, 1647: n = A,T,C or G
tacagtagattgaagagagagttagttatagtgataaacngaaaaaagaaatataaactaattagactgatggttnccgtaggccttattttttcgcagttagttttacctataaggcgactaggcttgcagatgatttctacacagaccaaagtgatcccccaagagattgttactcaaacagaaactcagggaactcaggtagttgcaacgaaacaaaaattagagtcagaaaatagtagtctaaaggtagctcttaaaagagaatcaggttttgaacataatgccncgattgatgcttctttagatacagaatcccaaggagataatagtcaacgtagcgtaactcaagctatcgttactatggcattagaattgagaaagcaagggctatcaatcgttgataccaaaatagttagaatccagtcttctaccaatcaaagaaacgatatcacaacaaccttaacttttaagaatggcttatctttagaaggtgcttcaaccgaagcaaacgacccgaatgtaagagtaggtatcgtaaatcctaatgatactgttcaaacaataacacctactattaaacaagaagcagatggtaaagttaagaaccttgtttttactggcaggcttgggaaacaggtcataatagttagcacaactcgtctaaaagaagaacaaacgatctcattagattcttatggagaattagttattgatggagctgttgggctcagccagaaagataggcccccttacagcaagccaatcacagtaaatatcttaaaaccaaggttatcctcaattgaaagttcgcttgattctaaagattttgaaatcgttaaaacgattgataatctctacacttgggacgatcagttttatctcttggattttatttccaaacaatacgaagttttaaaaacggactaccaatcagctaaggatagcacctcacaaacacgagatattttatttggagaatacactgttgagcctttagtcattaataaaggccataacaatacaattaacatttacattcgttcaacaaggccacttgggttaaaaccaataggagcagccccagcactaattcagccacgttcttttcgctccttaactcccagatcaactagaatgaagaggtctgccccagttgagaaattcgaaggtgaattggagcaccataagcggattgactatttaggagataatcaaaataatcctgataccaccatcgacgataaagaagacgaacatgacacctctgatatctatcgtctctatctggatatgacaggaaaaaagcaaccactggatatcctagtagttgtagataggtctgggagtatgcaggaggggataggatcgatagagaaatataaatattgggagtataaatatgatgaatattatcatatttggagaaatgctggtacgatatattttgataattatcttggtcctagatatcagcctgatacttatacatattatgattatcaatcgaaagaatcagncccttttggtattaagcgagatcaggcagtaaaagatgccttaataggatcaacaggacttttacagaaatttttagatattaaccctcaaaatcaacttgctgttgttggatttcagggnnnnnnn

SEQ ID NO: 394 - DNA, 1814 bp, Streptococcus pyogenes
cactggatatcctagtagttgtagataggtctgggagtatgcaggaggggataggatcgatagagaaatataaatattggaagtataaatatgatgaatattatcatatttggagaaatgctggtacgatatattttgataattatcttggtcctagatatcagcctgatacttatacatattatgattatcaatcgaaagaatcagtcccttttggtattaagcgagatcaggcagtaaaagatgccttaataggatcaacaggacttttacagaaatttttagatattaaccctcaaaatcaacttgctgttgttggatttcagggaagtgtcgcttacaggtattatgatgaaaagcctgagagaactccttggaatacgattatgtatcagccgagtaaatcaactagcaaagatgctgatgttttaaaagattgggaaacctcttcgaacttgagtcgtgatagtttatcctatgaggataggaacgggacgaactatcatgcagcactattaaaggcagatgaaaagcttcaaaaagtagctaataatggtcatcgaaaaataatggtttttattagtgatggtgttccaacattttattttggggcagataattatcgttcaggaaatggtactgtaagtgatagtaatattattaattctcaaaaaggcagtaagcttgcgatagatgaattcaaaaataaatacccaaacttgtccatttattccttaggtgtttctaaggatattaatagtgacacgtcaagctcaagtccagtggttctgaaatatttatcgggggatgactactactctggtattacagatacagagcaattagaaaaaactgccaataaaattgttgaagatagtaagatttctaacttaactatttctgatacgttgagccagtatgttaatgtatacgatgagcaaccagacattcttgtgacacgaaaatcaaagaagacaggggcaatagaaatcgtatataaagacaatagggtaacagaaatggggagagatattattgagggagtgagttttacttctgaaaaatcaggtaatagcactggaaaagtcaccttaaaatttaaaccagattacaaaatagatgatgagtacacctacaccttatcttttaatgtgaaagcttcagataaagcctatgagaagtataaggacgaaaaaggcaagtatacagttgaaggtgatgtagatacagactataatggaaatcaaactagttctggaaaaggtggtttgccttctaattcagatgcttcggttaattatatggcagatggtcgtgaacagaaattaccttataagcacccagtgattcaggtcaaaacagtaccaatcatgtttactaaagtagatgctgacaacagtcagaaaaaacttgaaggtgttgcgtttgaactccgtaaagcagacaagaaaacagtctgggaaaaaggaataacaaattcaactggccaactagagtttaactaccttcaaaaaggcaaaacctattatctttatgagactaaggccagaatagggtatactctcccagaaaatccatgggaggtcaaggttgacagtaagggtaaaattacagtgaagcaccctatcgagggagatctgagttctaaaggtgagacatatactataaagaatcacaaaatttatcagttaccatcatctggtggaagaggcagtcagcttttcattattttgggaagcatgctgatgacaactaccatactgctttatagacgttacaactatagaaagaagatggacaagactagcttataa

SEQ ID NO: 395 - DNA, 1650 bp, Streptococcus pyogenes; identical to SEQ ID NO: 251

SEQ ID NO: 396 - DNA, 582 bp, Streptococcus pyogenes
gtggaatgcctatcgtgatcgtcaattgttatcaacttatcacaaacaagtgactcaaaagaagccctcagaaatggaggaggtgtggcaaaaggctaaggcgtataacgctaggcttgggattcagcctgttccagatgctttttcatttagggatggcattcatgataaaaactacgaaagcctacttcaaattgaaaacaatgatattatgggatatgttgaagtgccctctattaaagtgacgttacccatataccactatacgacagacgaggtgctaactaagggagcaggtcacttatttggaagtgccttaccagttggtggcgacgggactcacacggttatttctgctcatagaggccttccatcggcagaaatgtttactaatttgaatttagtgaaaaagggagatactttttactttcgtgtgttaaataaagtattggcttataaagttgatcagatactaactgttgaaccagatcaagtcacatcactttccggagtcatggggaaagattatgctactctggttacctgcacaccatatggtgttaacaccaagcgtctattggt

SEQ ID NO: 397 - DNA, 754 bp, Streptococcus pyogenes
gtggaatgcctaccgtgatcgtcaattgttatccaacttatcacaaacaagtgactcaaaagaagccctcagaaatggaggaggtgtggcaaaaggctaaggcgtataacgctaggcttgggattcagcccgttccagatgctttttcatttagggatggcattcatgataaaaactacgaaagcctacttcaaattgaaaacaatgatattatgggatatgttgaagtgccctctattaaagtgacgttacccatataccactatacgacagacgaggtgctaactaagggagcaggtcacttagttggaagtgccttaccagttggtggcgacgggactcacacggttatttctgctcatagaggccttccatcggcagaaatgtttactaatttgaatttagtgaaaaggggagatactttttactttcgtgtgttaaataaagtattggcttataaagttgatcagatactaactgttgaaccagatcaagtcacatctctttctggggtaatgggaaaagattatgctactctggttacctgcacaccatatggtgttaataccaagcgtctattggtcagaggtcatagaattgcatatcattacaaaaagtatcaacaggctaaaaaagcaatgaaactcgtggataaatcaagaatgtggacagaagtagtatgtgctgctttcggggtggttatagctattattttagtatttatgtattcaaagatggactgataaaaaagtga

SEQ ID NO: 398 - DNA, 2246 bp, Streptococcus pyogenes
atgaataacaaaaaattgcaaaagaagcaagatgctcctcgggtatcaaacagaaagccaaaacaattaactgtcactttagtgggagtatttttaatgctcttagtattgataggatttgaaggaaaagttcgagcagctcacgaattggttgaggtaccagtacctatttttcacaatccagatccacagtcagactatcagtggtatggctatgaagcctatacaggggggtatccgaagtatgatttattcaagacatactatcatgatctgagagtgaatttgcatgggagtaaaagttatcaagtatattgctttaacgttcacaaacactatccccgttcctcccagagttttgatcggaagtggtataaaaaattagatggaactgctgagaattttgattctcttgctatggaaccaagagttcgtaaagaggagttaaccaaaaaactccgagctgttatgtataatgcctatcctaatgatgctaatggcattatgaaagatttagagcctttaaatgctattaaagtcactcaagaggctgtatggtactattctgattcagctcaaattaatccggatgaaagttttaaaacagaagctcaaagtaatggtattaatgaccagcagttaggcttaatgcgaaaagctttaaaagaactaattgatccaaacttagggtcaaaatattcgaataaaactccatcaggttatcggttaaatgtatttgaatctcatgataagactttccaaaatcttttgagtgctgagtatgttccggatactcccccaaaaccaggagaagagcctccggctaaaactgaaaaaacatcagtcattatcagaaaatatgcggaaggtgactactctaaacttctagagggagcaactttgcgtttaacaggggaagatatcccagattttcaagaaaaagtcttccaaagtaatggaacaggagaaaagattgaattatcaaatgggacttataccttaacagaaacatcatctccagatggatataaaattgcggagccgattaagtttagagtagtgaataaaaagtatttatcgtccaaaaagatggttctcaagtggaaaatccaaacaaagaagtaggttctccatatactatagaggcatacaatgattttgatgaatttggtttactgtcaacacaaaattatgcgaaattttattatggaaaaaactatgatggcagttcacaaattgtttattgcttcaatgccaacttgaaatccccacctgactcggaagatcatggtgctacaataaatcctgactttacgactggtgatattaggtatagtcatattgctggttcagatttgataaaatacgctaatacagctagggatgaagatcctcaattatttttaaaacacgtaaaaaaagtaattgaaaatgggtatcataaaaaaggtcaagctattccatataacggtctgactgaggcacagtttcgcgcggctactcaactggcaatttattattttacagatagtgttgacttaactaaggatagattgaaagacttccatggatttggagatatgaatgatcaaactttgggtgtagctaaaaaaattgtagaatacgctttgagtgatgaagattcaaaactaacaaatcttgatttcttcgtacctaataatagcaaataccaatctcttattgggacagaataccatccagatgatttggttgacgtgattcgtatggaagataaaaagcaagaagttattccagtaattcatagtttgacggtgaaaaaaacagtagtcggtgagttgggagataagactaaaggcttccaatttgaacttgagttgaaagataaaactggacagcctattgtcgacgctctaaaaactaataatcaagatttagtagctaaagatgggaaatattcatttaatctaaagcatggtgacaccataagaatagaaggattaccgacgggatattcttatactctgaaagagactgaagctaaggattatatagtaaccgttgataacaaagttagtcaagaagctcaatcagcaagtgagaatgtcacagcagacaaagaagtcacttttgaaaaccgtaaagatcttgtcccaccaactggttttactactgatggtggaacctatctgtggttattattgcttgtcccatttggtttgttagtgtggttctttggtcgtaaaggactaaaaaatgactaatta

SEQ ID NO: 399 - DNA, 1038 bp, Streptococcus pyogenes
atgaaaaaaaataaattattacttgctactgcaatcttagcaactgctttaggaacagcttctttaaatcaaaacgtaaaatctgagacggcaggagtgtccgaaaatgcaaaattaatagtaaaaaagacatttgactcttatacagacaatgaagttttaatgccaaaagctgattatacttttaaagtagaggcagatagttctgcaactgataaaacgaaagatggtttagagattaagccaggagtaactgaaggtttaactaccgagcagacaattgcttatgataactcagttaaaccatcggataaatctaagactgcaacttttgatttttcaaccgtaaaatttccagaagttggtgtttatcgttatacggtttcagaaatagatagcaaagttagtgggattaaatacgataccaaaacatggatagtggatgtttatgttgttaatgatggtaatggaggatttaaggcacggtatattgtatctaaagagaagggacaaaatgataaaaagcctgttgtttttgaaaactcctttaagacaacttctttaaaggtagaaaaacaggtgactggtaatacaggagaactaaagaaagacttcaatttcactttgacaattaatcctaatgataatttcgtagctggacaagttattaaattagagaaaggtggaattaaagctgatgttaagattggtgagccgtataaatttgctctaaagaatggtgagaaagtaactttatcaaaattaccagtaggtgttacttatagcatcattgaagatgaggcagataaagacggatacacaactaatgccaaaattacagatggtacggcagcgcctgtggaatataagttaggaaatcaacaattggctgacgaatctgctgacgaaatcgttgtcacaaataaccgtgacactcaagttccaactggtgttgtaggcacccttgctccatttgcagttcttagcattgtggctattggtggagttatctatattacaaaacgtaaaaaagcttaa

SEQ ID NO: 400 - DNA, 720 bp, Streptococcus pyogenes
atgacaattgtacaggttatcaataaagccattgatactctcattcttatcttttgtttagtcgtactatttttagctggttttggtttgtgggattcttatcatctctatcaacaagcagacgcttctaatttcaaaaaatttaaaacagctcaacaacagcctaaatttgaagacttgttagctttgaatgaggatgtcattggttggttaaatatcccagggactcatattgattatcctctagttcagggaaaaacgaatttagagtatattaataaagcagttgatggcagtgttgccatgtctggtagtttatttttagatacacggaatcataataattttacggacgattactctctgatttatggccatcatatggcaggtaatgccatgtttggcgaaattccaaaatttttaaaaaaggattttttcaacaaacataataaagctatcattgaaacaaaagagagaaaaaaactaaccgtcactatttttgcttgtctcaagacagatgcctttgaccagttagtttttaatcctaatgctattaccaatcaagaccaacaaaggcagcttgttgattatatcagtaaaagatcaaaacaatttaaacctgttaaattgaagcatcatacaaagttcgttgctttttcaacgtgtgaaaatttttctactgacaatcgtgttatcgttgtcggtactattcaagaataa

SEQ ID NO: 401 - DNA, 304 bp, Streptococcus pyogenes
  misc_feature 70, 72: n = A,T,C or G
atgttattttctgtcgtaatgatattaaccatgctggcctttaatcagactgttttagcaaaagacagcncngttcaaactagcattagtgtcgaaaatgtcttagagagagcaggcgatagtaccccattttcgattgcattagaatcaattgatgcgatgaaaacaatagaagaaataacaattgctggttctggaaaagcaagcttttcccctctgaccttcacaacagttgggcaatatacttatcgtgtttatcagaagccttcacaaaataaagattatcaagcagatactactgtat

SEQ ID NO: 402 - DNA, 2310 bp, Streptococcus pyogenes
  misc_feature 1023: n = A,T,C or G
atgaaatagcattgtgactgtccggtaaagggatgggactgaagattttattcagaaggagagggaatgaataacaaaaaattgcaaaagaagcaagatgctcctcgggtatcaaacagaaagccaaaacaattaactgtcactttagtgggagtatttttaatgctcttagtattgataggatttgaaggaaaagttcgagcagctcacgaattggttgaggtaccagtacctatttttcacaatccagatccacagtcagactatcagtggtatggctatgaagcctatacaggggggtatccgaagtatgatttattcaagacatactatcatgatctgagagtgaatttgcatgggagtaaaagttatcaagtatattgctttaacgttcacaaacactatccccgttcctcccagagttttgatcggaagtggtataaaaaattagatggaactgctgagaattttgattctcttgctatggaaccaagagttcgtaaagaggagttaaccaaaaaactccgagctgttatgtataatgcctatcctaatgatgctaatggcattatgaaagatttagagcctttaaatgctattaaagtcactcaagaggctgtatggtactattctgattcagctcaaattaatccggatgaaagttttaaaacagaagctcaaagtaatggtattaatgaccagcagttaggcttaatgcgaaaagctttaaaagaactaattgatccaaacttagggtcaaaatattcgaataaaactccatcaggttatcggttaaatgtatttgaatctcatgataagactttccaaaatcttttgagtgctgagtatgttccggatactcccccaaaaccaggagaagagcctccggctaaaactgaaaaaacatcagtcattatcagaaaatatgcggaaggtgactactctaaacttctagagggagcaactttgcgtttaacaggggaagatatcccagattttcaagaaaaagtcttccaaagtaanggaacaggagaaaagattgaattatcaaatgggacttataccttaacagaaacatcatctccagatggatataaaattgcggagccgattaagtttagagtagtgaataaaaaagtatttatcgtccaaaaagatggttctcaagtggaaaatccaaacaaagaagtaggttctccatatactatagaggcatacaatgattttgatgaatttggtttactgtcaacacaaaattatgcgaaattttattatggaaaaaactatgatggcagttcacaaattgtttattgcttcaatgccaacttgaaatccccacctgactcggaagatcatggtgctacaataaatcctgactttacgactggtgatattaggtatagtcatattgctggttcagatttgataaaatacgctaatacagctagggatgaagatcctcaattatttttaaaacacgtaaaaaaagtaattgaaaatgggtatcataaaaaaggtcaagctattccatataacggtctgactgaggcacagtttcgcgcggctactcaactggcaatttattattttacagatagtgttgacttaactaaggatagattgaaagacttccatggatttggagatatgaatgatcaaactttgggtgtagctaaaaaaattgtagaatacgctttgagtgatgaagattcaaaactaacaaatcttgatttcttcgtacctaataatagcaaataccaatctcttattgggacagaataccatccagatgatttggttgacgtgattcgtatggaagataaaaagcaagaagttattccagtaattcatagtttgacggtgaaaaaaacagtagtcggtgagttgggagataagactaaaggcttccaatttgaacttgagttgaaagataaaactggacagcctattgtcgacgctctaaaaactaataatcaagatttagtagctaaagatgggaaatattcatttaatctaaagcatggtgacaccataagaatagaaggattaccgacgggatattcttatactctgaaagagactgaagctaaggattatatagtaaccgttgataacaaagttagtcaagaagctcaatcagcaagtgagaatgtcacagcagacaaagaagtcacttttgaaaaccgtaaagatcttgtcccaccaactggttttactactgatggtggaacctatctgtggttattattgcttgtcccatttggtttgttagtgtggttctttggtcgtaaaggactaaaaaatgactaa

SEQ ID NO: 403 - DNA, 1038 bp, Streptococcus pyogenes; identical to SEQ ID NO: 399

SEQ ID NO: 404 - DNA, 367 bp, Streptococcus pyogenes
  misc_feature 313: n = A,T,C or G
atgacaattgtacaggttatcaataaagccattgatactctcattcttatcttttgtttagtcgtactatttttagctggttttggtttgtgggattcttatcatctctatcaacaagcagacgcttctaatttcaaaaaatttaaaacagctcaacaacagcctaaatttgaagacttgttagctttgaatgaggatgtcattggttggttaaatatcccagggactcatattgattatcctctagttcagggaaaaacgaatttagagtatattaataaagcagttgatgggcagtgttgccatgtctggnaatttatttttagatacacgggaatcataataatttttaccggacgattactct

SEQ ID NO: 405 - DNA, 448 bp, Streptococcus pyogenes
atgttattttctgtcgtaatgatattaaccatgctggcctttaatcagactgttttagcaaaagacagcactgttcaaactagcattagtgtcgaaaatgtcttagagagagcaggcgatagtaccccattttcgattgcattagaatcaattgatgcgatgaaaacaatagaagaaataacaattgctggttctggaaaagcaagcttttcccctctgaccttcacaacagttgggcaatatacttatcgtgtttatcagaagccttcacaaaataaagattatcaagcagatactactgtatttgacgttcttgtctatgtgacctatgatgaagatgagactctagccgcaaaagttatttctcgaagggctggagacgaagaaaaatcagcgattacttttaagcccaaacggttagtaaaaccaataccgcctagacaacctg

SEQ ID NO: 406 - DNA, 2310 bp, Streptococcus pyogenes
  misc_feature 2149: n = A,T,C or G
atgaaatagcattgtgactgtccggtaaagggatgggactgaagattttattcagaaggagagggaatgaataacaaaaaattgcaaaagaagcaagatgctcctcgggtatcaaacagaaagccaaaacaattaactgtcactttagtgggagtatttttaatgctcttagtattgataggatttgaaggaaaagttcgagcagctcacgaattggttgaggtaccagtacctatttttcacaatccagatccacagtcagactatcagtggtatggctatgaagcctatacaggggggtatccgaagtatgatttattcaagacatactatcatgatctgagagtgaatttgcatgggagtaaaagttatcaagtatattgctttaacgttcacaaacactatccccgttcctcccagagttttgatcggaagtggtataaaaaattagatggaactgctgagaattttgattctcttgctatggaaccaagagttcgtaaagaggagttaaccaaaaaactcctagctgttatgtataatgcctatcctaatgatgctaatggcattatgaaagatttagagcctttaaatgctattaaagtcactcaagaggctgtatggtactattctgattcagctcaaattaatccggatgaaagttttaaaacagaagctcaaagtaatggtattaatgaccagcagttaggcttaatgcgaaaagctttaaaagaactaattgatccaaacttagggtcaaaatattcgaataaaactccatcaggttatcggttaaatgtatttgaatctcatgataagactttccaaaatcttttgagtgctgagtatgttccggatactcccccaaaaccaggagaagagcctccggctaaaactgaaaaaacatcagtcattatcagaaaatatgcggaaggtgactactctaaacttctagagggagcaactttgcgtttaacaggggaagatatcccagattttcaagaaaaagtcttccaaagtaatggaacaggagaaaagattgaattatcaaatgggacttataccttaacagaaacatcatctccagatggatataaaattgcggagccgattaagtttagagtagtgaataaaaaagtatttatcgtccaaaaagatggttctcaagtggaaaatccaaacaaagaagtaggttctccatatactatagaggcatacaatgattttgatgaatttggtttactgtcaacacaaaattatgcgaaattttattatggaaaaaactatgatggcagttcacaaattgtttattgcttcaatgccaacttgaaatccccacctgactcggaagatcatggtgctacaataaatcctgactttacgactggtgatattaggtatagtcatattgctggttcagatttgataaaatacgctaatacagctagggatgaagatcctcaattatttttaaaacacgtaaaaaaagtaattgaaaatgggtatcataaaaaaggtcaagctattccatataacggtctgactgaggcacagtttcgcgcggctactcaactggcaatttattattttacagatagtgttgacttaactaaggatagattgaaagacttccatggatttggagatatgaatgatcaaactttgggtgtagctaaaaaaattgtagaatacgctttgagtgatgaagattcaaaactaacaaatcttgatttcttcgtacctaataatagcaaataccaatctcttattgggacagaataccatccagatgatttggttgacgtgattcgtatggaagataaaaagcaagaagttattccagtaattcatagtttgacggtgaaaaaaacagtagtcggtgagttgggagataagactaaaggcttccaatttgaacttgagttgaaagataaaactggacagcctattgtcgacgctctaaaaactaataatcaagatttagtagctaaagatgggaaatattcatttaatctaaagcatggtgacaccataagaatagaaggattaccgacgggatattcttatactctgaaagagactgaagctaaggattatatagtaaccgttgataacaaagttagtcaagaagctcaatcagcaagtgagnatgtcacagcagacaaagaagtcacttttgaaaaccgtaaagatcttgtcccaccaactggttttactactgatggtggaacctatctgtggttattattgcttgtcccatttggtttgttagtgtggttctttggtcgtaaaggactaaaaaatgactaa

SEQ ID NO: 407 - DNA, 1038 bp, Streptococcus pyogenes; identical to SEQ ID NO: 399

SEQ ID NO: 408 - DNA, 378 bp, Streptococcus pyogenes
  misc_feature 305, 343: n = A,T,C or G
atgatgatgacaattgtacaggttatcaataaagccattgatactctcattcttatcttttgtttagtcgtactatttttagctggttttggtttgtgggattcttatcatctctatcaacaagcagacgcttctaatttcaaaaaatttaaaacagctcaacaacagcctaaatttgaagacttgttagctttgaatgaggatgtcattggttggttaaatatcccagggactcatattgattatcctctagttcagggaaaaacgaattttagagtatattaataaagcagttgatggcagtnttgccatgtctgggtagtttattttttagatacacggnaatcataaataattttacggacgattactcttctg

SEQ ID NO: 409 - DNA, 448 bp, Streptococcus pyogenes
  misc_feature 105, 420, 421, 422: n = A,T,C or G
atgttattttctgtcgtaatgatattaaccatgctggcctttaatcagactgttttagcaaaagacagcactgttcaaactagcattagtgtcgaaaatgtcttngagagagcaggcgatagtaccccattttcgattgcattagaatcaattgatgcgatgaaaacaatagaagaaataacaattgctggttctggaaaagcaagcttttcccctctgaccttcacaacagttgggcaatatacttatcgtgtttatcagaagccttcacaaaataaagattatcaagcagatactactgtatttgacgttcttgtctatgtgacctatgatgaagatgagactctagccgcaaaagttatttctcgaagggctggagacgaagaaaaatcagcgattacttttaagcccaaacggttnnnaaaaccaataccgcctagacaacctg

SEQ ID NO: 410 - DNA, 2243 bp, Streptococcus pyogenes
  misc_feature 436, 437, 438, 439, 440, 441, 442, 443, 444, 445, 446, 465,620, 1095: n = A,T,C or G
atgaataacaaaaaattgcaaaagaagcaagatgctcctcgggtatcaaacagaaagccaaaacaattaactgtcactttagtgggagtatttttaatgctcttagtattgataggatttgaaggaaaagttcgagcagctcacgaattggttgaggtaccagtacctatttttcacaatccagatccacagtcagactatcagtggtatggctatgaagcctatacaggggggtatccgaagtatgatttattcaagacatactatcatgatctgagagtgaatttgcatgggagtaaaagttatcaagtatattgctttaacgttcacaaacactatccccgttcctcccagagttttgatcggaagtggtataaaaaattagatggaactgctgagaattttgattctcttgctatggaaccaagagttcgtnnnnnnnnnnnaccaaaaaactccgagctnttatgtataatgcctatcctaatgatgctaatggcattatgaaagatttagagcctttaaatgctattaaagtcactcaagaggctgtatggtactattctgattcagctcaaattaatccggatgaaagttttaaaacagaagctcaaagtaanggtattaatgaccagcagttaggcttaatgcgaaaagctttaaaagaactaattgatccaaacttagggtcaaaatattcgaataaaactccatcaggttatcggttaaatgtatttgaatctcatgataagactttccaaaatcttttgagtgctgagtatgttccggatactcccccaaaaccaggagaagagcctccggctaaaactgaaaaaacatcagtcattatcagaaaatatgcggaaggtgactactctaaacttctagagggagcaactttgcgtttaacaggggaagatatcccagattttcaagaaaaagtcttccaaagtaatggaacaggagaaaagattgaattatcaaatgggacttataccttaacagaaacatcatctccagatggatataaaattgcggagccgattaagtttagagtagtgaataaaaaagtatttatcgtccaaaaagatggtnctcaagtggaaaatccaaacaaagaagtaggttctccatatactatagaggcatacaatgattttgatgaatttggtttactgtcaacacaaaattatgcgaaattttattatggaaaaaactatgatggcagttcacaaattgtttattgcttcaatgccaacttgaaatccccacctgactcggaagatcatggtgctacaataaatcctgactttacgactggtgatattaggtatagtcatattgctggttcagatttgataaaatacgctaatacagctagggatgaagatcctcaattatttttaaaacacgtaaaaaaagtaattgaaaatgggtatcataaaaaaggtcaagctattccatataacggtctgactgaggcacagtttcgcgcggctactcaactggcaatttattattttacagatagtgttgacttaactaaggatagattgaaagacttccatggatttggagatatgaatgatcaaactttgggtgtagctaaaaaaattgtagaatacgctttgagtgatgaagattcaaaactaacaaatcttgatttcttcgtacctaataatagcaaataccaatctcttattgggacagaataccatccagatgatttggttgacgtgattcgtatggaagataaaaagcaagaagttattccagtaattcatagtttgacggtgaaaaaaacagtagtcggtgagttgggagataagactaaaggcttccaatttgaacttgagttgaaagataaaactggacagcctattgtcgacgctctaaaaactaataatcaagatttagtagctaaagatgggaaatattcatttaatctaaagcatggtgacaccataagaatagaaggattaccgacgggatattcttatactctgaaagagactgaagctaaggattatatagtaaccgttgataacaaagttagtcaagaagctcaatcagcaagtgagaatgtcacagcagacaaagaagtcacttttgaaaaccgtaaagatcttgtcccaccaactggttttactactgatggtggaacctatctgtggttattattgcttgtcccatttggtttgttagtgtggttctttggtcgtaaaggactaaaaaatgactaa

SEQ ID NO: 411 - DNA, 1038 bp, Streptococcus pyogenes; identical to SEQ ID NO: 399

SEQ ID NO: 412 - DNA, 392 bp, Streptococcus pyogenes
  misc_feature 190, 200, 230, 258, 294, 302: n = A,T,C or G
atgatgatgacaattgtacaggttatcaataaagccattgatactctcattcttatcttttgtttagtcgtactatttttagctggttttggtttgtgggattcttatcatctctatcaacaagcagacgcttctaatttcaaaaaatttaaaacagctcaacaacagcctaaatttgaagacttgttanctttgaatgnggatgtcattggttggttaaatatcccagngactcatattgattatcctctagttcanggaaaaacgaatttagagtatattaataaagcagtngatggcantgttgccatgtctggtagtttaatttttagatacccgggaatcataataattttacgggacgattactctctgatttatggccatcatat

SEQ ID NO: 413 - DNA, 446 bp, Streptococcus pyogenes
  misc_feature 191: n = A,T,C or G
atgttattttctgtcgtaatgatattaaccatgctggcctttaatcagactgttttagcaaaagacagcactgttcaaactagcattagtgtcgaaaatgtcttagagagagcaggcgatagtaccccattttcgattgcattagaatcaattgatgcgatgaaaacaatagaagaaataacaattgctgnttctggaaaagcaagcttttcccctctgaccttcacaacagttgggcaatatacttatcgtgtttatcagaagccttcacaaaataaagattatcaagcagatactactgtatttgacgttcttgtctatgtgacctatgatgaagatgagactctagccgcaaaagttatttctcgaagggctggagacgaagaaaaatcagcgattacttttaagcccaaacggttagtaaaaccaataccgcctagacaacc

SEQ ID NO: 414 - DNA, 2246 bp, Streptococcus pyogenes
  misc_feature 399, 441, 442, 468, 469, 1732, 1736, 1987: n = A,T,C or G
atgaataacaaaaaattgcaaaagaagcaagatgctcctcgggtatcaaacagaaagccaaaacaattaactgtcactttagtgggagtatttttaatgctcttagtattgataggatttgaaggaaaagttcgagcagctcacgaattggttgaggtaccagtacctatttttcacaatccagatccacagtcagactatcagtggtatggctatgaagcctatacaggggggtatccgaagtatgatttattcaagacatactatcatgatctgagagtgaatttgcatgggagtaaaagttatcaagtatattgctttaacgttcacaaacactatccccgttcctcccagagttttgatcggaagtggtataaaaaattagatggaactgctganaattttgattctcttgctctggaaccaagagttcgtaaagannagttaaccccaaaaaactcctagctnntatgtataatgcctatcctaatgatgctaatggcattatgaaagatttagagcctttaaatgctattaaagtcactcaagaggctgtatggtactattctgattcagctcaaattaatccggatgaaagttttaaaacagaagctcaaagtaatggtattaatgaccagcagttaggcttaatgcgaaaagctttaaaagaactaattgatccaaacttagggtcaaaatattcgaataaaactccatcaggttatcggttaaatgtatttgaatctcatgataagactttccaaaatcttttgagtgctgagtatgttccggatactcccccaaaaccaggagaagagcctccggctaaaactgaaaaaacatcagtcattatcagaaaatatgcggaaggtgactactctaaacttctagagggagcaactttgcgtttaacaggggaagatatcccagattttcaagaaaaagtcttccaaagtaatggaacaggagaaaagattgaattatcaaatgggacttataccttaacagaaacatcatctccagatggatataaaattgcggagccgattaagtttagagtagtgaataaaaaagtatttatcgtccaaaaagatggttctcaagtggaaaatccaaacaaagaagtaggttctccatatactatagaggcatacaatgattttgatgaatttggtttactgtcaacacaaaattatgcgaaattttattatggaaaaaactatgatggcagttcacaaattgtttattgcttcaatgccaacttgaaatccccacctgactcggaagatcatggtgctacaataaatcctgactttacgactggtgatattaggtatagtcatattgctggttcagatttgataaaatacgctaatacagctagggatgaagatcctcaattatttttaaaacacgtaaaaaaagtaattgaaaatgggtatcataaaaaaggtcaagctattccatataacggtctgactgaggcacagtttcgcgcggctactcaactggcaatttattattttacagatagtgttgacttaactaaggatagattgaaagacttccatggatttggagatatgaatgatcaaactttgggtgtagctaaaaaaattgtagaatacgctttgagtgatgaagattcaaaactaacaaatcttgatttcttcgtacctaataatagcaaataccaatctcttattgggacagaataccatccagatgattnggtngacgtgattcgtatggaagataaaaagcaagaagttattccagtaattcatagtttgacggtgaaaaaaacagtagtcggtgagttgggagataagactaaaggcttccaatttgaacttgagttgaaagataaaactggacagcctattgtcgacgctctaaaaactaataatcaagatttagtagctaaagatgggaaatattcatttaatctaaagcatggtgacaccataagaatagaaggattacngacgggatattcttatactctgaaagagactgaagctaaggattatatagtaaccgttgataacaaagttagtcaagaagctcaatcagcaagtgagaatgtcacagcagacaaagaagtcacttttgaaaaccgtaaagatcttgtcccaccaactggttttactactgatggtggaacctatctgtggttattattgcttgtcccatttggtttgttagtgtggttctttggtcgtaaaggactaaaaaatgactaa

SEQ ID NO: 415 - DNA, 1038 bp, Streptococcus pyogenes; identical to SEQ ID NO: 399

SEQ ID NO: 416 - DNA, 381 bp, Streptococcus pyogenes
  misc_feature 51: n = A,T,C or G
atgatgatgacaattgtacaggttatcaataaagccattgatactctcatncttatcttttgtttagtcgtactatttttagctggttttggtttgtgggattcttatcatctctatcaacaagcagacgcttctaatttcaaaaaatttaaaacagctcaacaacagcctaaatttgaagacttgttagctttgaatgaggatgtcattggttggttaaatatcccagggactcatattgattatcctctagttcagggaaaaacgaatttagagtatattaataaagcagttggatggcagtgttgccatgtctggtagtttattttagatacacggaatcataataattttacggacgattactctctgaatttatgg

SEQ ID NO: 417 - DNA, 443 bp, Streptococcus pyogenes
  misc_feature 422: n = A,T,C or G
atgttattttctgtcgtaatgatattaaccatgctggcctttaatcagactgttttagcaaaagacagcactgttcaaactagcattagtgtcgaaaatgtcttagagagagcaggcgatagtaccccattttcgattgcattagaatcaattgatgcgatgaaaacaatagaagaaataacaattgctggttctggaaaagcaagcttttcccctctgaccttcacaacagttgggcaatatacttatcgtgtttatcagaagccttcacaaaataaagattatcaagcagatactactgtatttgacgttcttgtctatgtgacctatgatgaagatgagactctagccgcaaaagttatttctcgaagggctggagacgaagaaaaatcagcgattacttttaagcccaaacggttagnaaaaccaataccgcctagaca

SEQ ID NO: 418 - DNA, 2244 bp, Streptococcus pyogenes
  misc_feature 466: n = A,T,C or G
atgaataacaaaaaattgcaaaagaagcaagatgctcctcgggtatcaaacagaaagccaaaacaattaactgtcactttagtgggagtatttttaatgctcttagtattgataggatttgaaggaaaagttcgagcagctcacgaattggttgaggtaccagtacctatttttcacaatccagatccacagtcagactatcagtggtatggctatgaagcctatacaggggggtatccgaagtatgatttattcaagacatactatcatgatctgagagtgaatttgcatgggagtaaaagttatcaagtatattgctttaacgttcacaaacactatccccgttcctcccagagttttgatcggaagtggtataaaaaattagatggaactgctgagaattttgattctcttgctatggaaccaagagttcgtaaagaggagttaaccaaaaaactcctagctnttatgtataatgcctatcctaatgatgctaatggcattatgaaagatttagagcctttaaatgctattaaagtcactcaagaggctgtatggtactattctgattcagctcaaattaatccggatgaaagttttaaaacagaagctcaaagtaatggtattaatgaccagcagttaggcttaatgcgaaaagctttaaaagaactaattgatccaaacttagggtcaaaatattcgaataaaactccatcaggttatcggttaaatgtatttgaatctcatgataagactttccaaaatcttttgagtgctgagtatgttccggatactcccccaaaaccaggagaagagcctccggctaaaactgaaaaaacatcagtcattatcagaaaatatgcggaaggtgactactctaaacttctagagggagcaactttgcgtttaacaggggaagatatcccagattttcaagaaaaagtcttccaaagtaatggaacaggagaaaagattgaattatcaaatgggacttataccttaacagaaacatcatctccagatggatataaaattgcggagccgattaagtttagagtagtgaataaaaaagtatttatcgtccaaaaagatggttctcaagtggaaaatccaaacaaagaagtaggttctccatatactatagaggcatacaatgattttgatgaatttggtttactgtcaacacaaaattatgcgaaattttattatggaaaaaactatgatggcagttcacaaattgtttattgcttcaatgccaacttgaaatccccacctgactcggaagatcatggtgctacaataaatcctgactttacgactggtgatattaggtatagtcatattgctggttcagatttgataaaatacgctaatacagctagggatgaagatcctcaattatttttaaaacacgtaaaaaaagtaattgaaaatgggtatcataaaaaaggtcaagctattccatataacggtctgactgaggcacagtttcgcgcggctactcaactggcaatttattattttacagatagtgttgacttaactaaggatagattgaaagacttccatggatttggagatatgaatgatcaaactttgggtgtagctaaaaaaattgtagaatacgctttgagtgatgaagattcaaaactaacaaatcttgatttcttcgtacctaataatagcaaataccaatctcttattgggacagaataccatccagatgatttggttgacgtgattcgtatggaagataaaaagcaagaagttattccagtaattcatagtttgacggtgaaaaaaacagtagtcggtgagttgggagataagactaaaggcttccaatttgaacttgagttgaaagataaaactggacagcctattgtcgacgctctaaaaactaataatcaagatttagtagctaaagatgggaaatattcatttaatctaaagcatggtgacaccataagaatagaaggattaccgacgggatattcttatactctgaaagagactgaagctaaggattatatagtaaccgttgataacaaagttagtcaagaagctcaatcagcaagtgagaatgtcacagcagacaaagaagtcacttttgaaaaccgtaaagatcttgtcccaccaactggttttactactgatggtggaacctatctgtggttattattgcttgtcccatttggtttgttagtgtggttctttggtcgtaaaggactaaaaaatgactaa

SEQ ID NO: 419 - DNA, 575 bp, Streptococcus pyogenes
atgaaaaaaaataaattattacttgctactgcaatcttagcaactgctttaggaacagcttctttaaatcaaaacgtaaaatctgagacggcaggagtgtccgaaaatgcaaaattaatagtaaaaaagacatttgactcttatacagacaatgaagttttaatgccaaaagctgattatacttttaaagtagaggcagatagttctgcaactgataaaacgaaagatggtttagagattaagccaggagtaactgaaggtttaactaccgagcagacaattgcttatgataactcagttaaaccatcggataaatctaagactgcaacttttgatttttcaaccgtaaaatttccagaagttggtgtttatcgttatacggtttcagaaatagatagcaaagttagtgggattaaatacgataccaaaacatggatagtggatgtttatgttgttaatgatggtaatggaggatttaaggcacggtatattgtatctaaagagaagggacaaaatgataaaaagcctgttgtttttgaaaactcctttaagacaacttctttaaaggtagaaaa

SEQ ID NO: 420 - DNA, 362 bp, Streptococcus pyogenes
agaaaggtggaattaaagctgatgttaagattggtgagccgtataaatttgctctaaagaatggtgagaaagtaactttatcaaaattaccagtaggtgttacttatagcatcattgaagatgaggcagataaagacggatacacaactaatgccaaaattacagatggtacggcagcgcctgtggaatataagttaggaaatcaacaattggctgacgaatctgctgacgaaatcgttgtcacaaataaccgtgacactcaagttccaactggtgttgtaggcacccttgctccatttgcagttcttagcattgtggctattggtggagttatctatattacaaaacgtaaaaaagcttaa

SEQ ID NO: 421 - DNA, 306 bp, Streptococcus pyogenes
  misc_feature 197, 260: n = A,T,C or G
atgatgatgacaattgtacaggttatcaataaagccattgatactctcattcttatcttttgtttagtcgtactatttttagctggttttggtttgtgggattcttatcatctctatcaacaagcagacgcttctaatttcaaaaaatttaaaacagctcaacaacagcctaaatttgaagacttgttagctttgantgaggatgtcattggttggtttaaatatcccagggactcatattgattatcctccgggttcanggaaaaacggaatttagagtatatttaataatagcaatgtgatggc

SEQ ID NO: 422 - DNA, 926 bp, Streptococcus pyogenes
ctggtgatattaggtacagtcatattgctggttcagatttgataaaatacgctaatacagctagggatgaagatcctcaattatttttaaaacacgtaaaaaaagtaattgaaaatgggtatcataaaaaaggtcaagctattccatataacggtctgactgaggcacagtttcgtgcggctactcaactggcaatttattattttacagatagtgttgacttaactaaggatagattgaaagacttccatggatttggagatatgaatgatcaaactttgggtgtagctaaaaaaattgtagaatacgctttgagtgatgaagattcaaaactaacaaatcttgatttcttcgtacctaataatagcaaataccaatctcttattgggacagaataccatccagatgatttggttgacgtgattcgtatggaagataaaaagcaagaagttattccagtaactcatagtttgacggtgcaaaaaacagtagtcggtgagttgggagataagactaaaggctttcaatttgaacttgagttgaaagataaaactggacagcctattgttaacactctaaaaactaataatcaagatttagtagctaaagatgggaaatattcatttaatctaaagcatggtgacaccataagaatagaaggattaccgacgggatattcttataccctgaaagagactgaagctaaggattatatagtaactgttgataacaaagttagtcaagaagctcaatcagcaagtgagaatgtcacagcagacaaagaagtcacttttgaaaaccgaaaagatcttgtcccaccaactggtttgacaacagatggggctatctatctttggttattactacttgttccatttgggttattggtttggctatttggtcgtaaagggttaaaaaatgactaa

SEQ ID NO: 423 - DNA, 1056 bp, Streptococcus pyogenes; identical to SEQ ID NO: 94

SEQ ID NO: 424 - DNA, 687 bp, Streptococcus pyogenes
gatactctcattcttatcttttgtttagtcgtactatttttagctggttttggtttgtgggattcttatcatctctatcaacaagcagacgcttctaatttcaaaaaatttaaaacagctcaacaacagcctaaatttgaagacttgttagctttgaatgaggatgtcattggttggttaaatatcccagggactcatattgattatcctctagttcagggaaaaacgaatttagagtatattaataaagcagttgatggcagtgttgccatgtctggtagtttatttttagatacacggaatcataatgattttacggacgattactctctgatttatggccatcatatggcaggtaatgccatgtttggcgaaattccaaaatttttaaaaaaggattttttcaacaaacataataaagctatcattgaaacaaaagagagaaaaaaactaaccgtcactatttttgcttgtctcaagacagatgcctttgaccagttagtttttaatcctaatgctattaccaatcaagaccaacaaaagcagctcgttgattatatcagtaaaagatcaaaacaatttaaacctgttaaattgaagcatcatacaaagttcgttgctttttcaacgtgtgaaaatttttctactgacaatcgtgttatcgttgtcggtactattcaagaataa

SEQ ID NO: 425 - DNA, 404 bp, Streptococcus pyogenes
aaagacagcactgttcaaactagcattagtgtcgaaaatgtcttagagagagcaggcgatagtaccccattttcggttgcattagaatcaattgatgcgatgaaaacaatagacgaaataacaattgctggttctggaaaagcaagcttttcccctctgaccttcacaacagttgggcaatatacttatcgtgtttatcagaagccttcacaaaataaagattatcaagcagatactactgtatttgacgttcttgtctatgtgacctatgatgaagatgggactctagtcgcaaaagttatttctcgaagggctggagacgaagaaaaatcagcgattacttttaagcccaaacggttagtaaaaccaataccgcctagacaacctaacatccctaaaacccc

SEQ ID NO: 426 - DNA, 74 bp, Streptococcus pyogenes
gtggaatgtctatcgtgatcgttaattgttatcaacttatcacaaacaagtgactcaaaagaagccctcagaag

SEQ ID NO: 427 - DNA, 392 bp, Streptococcus pyogenes
tgtgtggcaaaaggctaaggcgtataacgctaggcttgggattcagcccgttccagatactttttactttcgtgtgttaaataaagtattggcttataaagttgatcagatactaactgttgaaccagatcaagtcacatctctttctgaggtaatgggaaaagattatgctactctggttacctgcacaccatatggtgttaataccaagcgtctattggtcagaggtcatagaattgcatttcattacaaaaagtatcaacaggctaaaaaagcaatgaaactcgtggataaatcaagaatgtggacagaagtagtatgtgctgctttcggggtggttatagctattattttagtatttatgtattcaaagatgactgataaaaaagtga

SEQ ID NO: 428 - DNA, 2260 bp, Streptococcus pyogenes
atgaataacaaaaaattgcaaaagaagcaagatgctcctcgggtatcaaacagaaagccaaaacaattaactgtcactttagtgggagtatttttaatgtttttgaccttggtaagttccatgagaggtgctcaaagcatatttggagaggaaaagagaattgaagaagtcagtgttcctaaaataaaaagtccagatgatgcctacccttggtatggctatgattcatatgactctagtcatccttactatgaacgttttaaagtagcacatgatttaagggttaatttaaatggaagtaagagctaccaagtatattgctttaatatcaattctcattatccgaatagaaaaaatgctttttctaaacaatggtttaagagagttgatgggacaggtgatgtgttcacaaattatgctcagacacctaagattcgtggagaatcattgaataataaacttttaagtattatgtacaacgcttatcctaaaaatgctaatggctatatggataagatagaaccattaaatgctattttagtaactcaacaagctgtttggtactattctgacagttcttatggtaatataaaaacgttatgggcatctgagcttaaagacggaaaaatagattttgaacaagtaaaattaatgcgtgaagcttactcaaaactaattagtgatgatttagaagaaacatctaaaaataagctacctcaaggatctaaactgaatatttttgttccgcaagataaatctgttcaaaatttattaagtgcagagtacgtgcctgaatcccctccggcaccaggtcagtctccagaaccgccagtgcaaacaaaaaaaacatcagtcattatcagaaaatatgcggaaggtgactactctaaacttctagagggagcaactttgcgtttaacaggggaagatatcctagattttcaagaaaaagtcttccaaagtaatggaacaggagaaaagattgaattatcaaatgggacttataccttaacagaaacatcatctccagatggatataaaattgcggagccgattaagtttagagtagtgaataaaaaagtatttatcgtccaaaaagatggttctcaagtggaaaatccaaacaaagaagtagcagagccatactcagtggaagcgtacagcgatatgcaagatagtaactatattaatccagaaacgttcactccttatgggaaattttattacgctaaaaataaggataaaagttcacaagttgtctactgttttaatgctgatttacactctccacctgaatcagaggatggaggaggaactatagatcctgatattagtacgatgaaagaagtcaagtacacacatacggcaggtagtgatttgtttaaatacgcgctaagaccgagagatacaaatccagaagacttcttaaagcacattaaaaaagtaattgaaaaaggctacaataaaaaaggtgatagctataatggattaacagaaacacagtttcgcgcggctactcagcttgctatctattactttacagacagcactgacttaaaaaccttaaaaacttataacaatgggaaaggttaccatggatttgaatctatggatgaaaaaaccctagctgtaacaaaagaattaattaattacgctcaagataatagtgcccctcaactaacaaatcttgatttcttcgtacctaataatagcaaataccaatctcttattgggacagaataccatccagatgatttggttgacgtgattcgtatggaagataaaaagcaagaagttattccagtaactcacagtttgacagtgaaaaaaacagtagtcggtgagttgggagataaaactaaaggcttccaatttgaacttgagttgaaagataaaactggacagcctattgttaacactctaaaaactaataatcaagatttagtagctaaagatgggaaatattcatttaatctaaagcatggtgacaccataagaatagaaggattaccgacgggatattcttatactctgaaagagactgaagctaaggattatatagtaaccgttgataacaaagttagtcaagaagctcaatcagcaagtgagaatgtcacagcagacaaagaagtcacttttgaaaaccgtaaagatcttgtcccaccaactggttttactactgatggtggaacctatctgtggttattattgcttgtcccatttggtttgttagtgtggttctttggtcgtaaaggactaa

SEQ ID NO: 429 - DNA, 1056 bp, Streptococcus pyogenes
ttggagagagagaaaatgaaaaaaaataaattattacttgctactgcaatcttagcaactgctttaggaacagcttctttaaatcaaaacgtaaaagctgagacggcaggagttgtaacaggaaaatcactacaagttacaaagacaatgacttatgatgatgaagaggtgttaatgcccgaaaccgcctttacttttactatagagcctgatatgactgcaagtggaaaagaaggcgacctagatattaaaaatggaattgtagaaggcttagacaaacaagtaacagtaaaatataagaatacagataaaacatctcaaaaaactaaaatagcacaatttgatttttctaaggttaaatttccagctataggtgtttaccgctatatggtttcagagaaaaacgataaaaaagacggaattaggtacgatgataaaaagtggactgtagatgtttatgttgggaataaggccaataacgaagaaggtttcgaagttctatatattgtatcaaaagaaggtacttctagtactaaaaaaccaattgaatttacaaactctattaaaactacttccttaaaaattgaaaaacaaataactggcaatgcaggagatcgtaaaaaatcattcaacttcacattaacattacaaccaagtgaatattataaaaccggatcagttgtgaaaatcgaacaggatggaagtaaaaaagatgtgacgataggaacgccttacaaatttactttgggacacggtaagagtgtcatgttatcgaaattaccaattggtatcaattactatcttagtgaagacgaagcgaataaagacggttacactacaacggcaacattaaaagaacaaggcaaagaaaagagttccgatttcactttgagtactcaaaaccagaaaacagacgaatctgctgacgaaatcgttgtcacaaataagcgtgacactcaagttccaactggtgttgtagggacccttgctcgcatttgcagttcttagcattgtagctattggtggagttatctatattacagacgtaaaagagct

SEQ ID NO: 430 - DNA, 647 bp, Streptococcus pyogenes
tagctggttttggtttgtgggattcttatcatctctatcaacaagcagacgcttctaatttcaaaaaatttaaaacagctcaacaacagcctaaatttgaagacttgttagctttgaatgaggatgtcattggttggttaaatatcccagggactcatattgattatcctctagttcagggaaaaacgaatttagagtatattaataaagcagttgatggcagtgttgccatgtctggtagtttatttttagatacacggaatcataatgattttacggacgattactctctgatttatggccatcatatggcaggtaatgccatgtttggcgaaattccaaaatttttaaaaaaggattttttcaacaaacataataaagctatcattgaaacaaaagagagaaaaaaactaaccgtcactatttttgcttgtctcaagacagatgcctttgaccagttagtttttaatcctaatgctattaccaatcaagaccaacaaaggcagcttgttgattatatcagtaaaagatcaaaacaatttaaacctgttaaattgaagcatcatacaaagttcgttgctttttcaacgtgtgaaaatttttctactgacaatcgtgttatcgttgtcggtactattcaagaataa

SEQ ID NO: 431 - DNA, 399 bp, Streptococcus pyogenes
  misc_feature 391: n = A,T,C or G
aaagacagcactgttcaaactagcattagtgtcgaaaatgtcttagagagagcaggcgatagtaccccattttcgattgcattagaatcaattgatgcgatgaaaacaatagaagaaataacaattgctggttctggaaaagcgagcttttcccctctgaccttcacaacagttgggcaatatacttatcgtgtttatcagaagccttcacaaaataaagattatcaagcagatactactgtatttgacgttcttgtctatgtgacctatgatgaagatgggactctagtcgcaaaagttattcctcgaagggctggagacgaagaaaaatcagcgattacttttaagcccaaacggttagtaaaaccaataccgcctagacaacctgacntccctaaa

SEQ ID NO: 432 - DNA, 729 bp, Streptococcus pyogenes
gtggaatgcctaccgtgatcgtcaattgttatcaacttatcacaaacaagtgactcaaaagaagccctcagaaatggaggaggtgtggcaaaaggctaaggcgtataacgctaggcttgggattcagcccgttccagatgctttttcatttagggatggcattcatgataaaaactacgaaagcttacttcaaattgaaaacaatgatattatgggatatgttgaagtgccctctattaaagtgacgttacccatataccactatacgacagacgaggtgctaactaagggagcaggtcacttagttggaagtgccttaccagttggtggcgacgggactcacacggttatttctgctcatagaggccttccatcggcagaaatgtttactaatttgaatttagtgaaaaggggagatactttttactttcgtgtgttaaataaagtattggcttataaagttgatcagatactaactgttgaaccagatcaagtcacatctctttctggggtaatgggaaaagattatgctactctggttacctgcacaccatatggtgttaataccaagcgtctattggtcagaggtcatagaattgcatatcattacaaaaagtatcaacaggctaaaaaagcaatgaaactcgtggataaatcaagaatgtggacagaagtagtatgtgctgctttcggggtggttatagctattattttagtatttatgtattc

SEQ ID NO: 433 - DNA, 2265 bp, Streptococcus pyogenes
  misc_feature 1012: n = A,T,C or G
atgaataacaaaaaattgcaaaagaagcaagatgctcctcgggtatcaaacagaaagccaaaacaattaactgtcactttagtgggagtatttttaatgctcttagtattgataggatttgaaggaaaagttcgagcagctcacgaattggttgaggtaccagtacctatttttcacaatccagatccacagtcagactatcagtggtatggctatgaagcctatacaggggggtatccgaagtatgatttattcaagacatactatcatgatctgagagtgaatttgcatgggagtaaaagttatcaagtatattgctttaacgttcacaaacactatcctcgttcctcccagagttttgatcggaagtggtataaaaaattagatggaactgctgagaattttgattctcttgctatggaaccaagagttcgtaaagaggagttaaccaaaaaactccgagctgttatgtataatgcctatcctaatgatgctaatggcattatgaaagatttagagcctttaaatgctattaaagtcactcaagaagctgtatggtactattcggacaattctcctattaacccagatgaaagttttaaatctgaagctctggctaataaaattagtgctacacaaatatctttaatgagagaggctttgaagcaacttattgctcctgatttagatgagaagcaatctaggagagttcctgatggatatcagttgagtatttttgaatctgagaataaggattatcaaaatcttttggctgcagaagaggttcctattcaacctccaaaaccgggggataagccaccactaccgccagtgcaaacaaaaaaaacatcagtcattatcagaaaatatgcggaaggtgactactctaaacttctagagggagcaaccttaaagcttgctcaaattgaaggaagtggttttcaggagaaaatttttgatagtaacaaatctggagagaaagtagagctacctaatgggacttacgttttangtgagctaaaacctcctcaaggatatagatttgccacacccattacttttaaagttgcagctgggaaagttttaataaaaaataaagaaggtcaatttgtagagaaccaaaataaggaaatcgcagagccatattctgtaacagctttcaatgactttgaagagattggttatttatctgattttaataactatggtaaattttactatgcaaaaaatactaatggaactagtcaagttgtctactgtttcaatgctgatttacactcaccacctgactcatatgatagtggtgagactataaatccagatactagtacgatgaaagaagtcaagtacacacatacggcaggtggtgatttgtttaaatacgcgctaagaccgagagatacaaatccagaagacttcctaaagcatattaaaaaagtaattgaaaaaggctacaagaaaaaaggtgatagctataatggattaacagaaacacagtttcgcgcggctactcagcttgctatctattactttacagacagcactgacttaaaaaccttaaaaacttataacaatgggaaaggttaccatggatttgaatctgtggatgaaaaaaccctagctgtcacaaaagaattaattacttatgctcaaaatggcagtgcccctcaactaacaaatcttgatttcttcgtacctaataatagcaaataccaatctcttattgggacagaataccatccagatgatttggttgacgtgattcgtatggaagataaaaagcaagaagttattccagtaactcacagtttgacagtgaaaaaaacagtagtcggtgagttgggagataaaactaaaggcttccaatttgaacttgagttgaaagataaaactggacagcctattgttaacactctaaaaactaataatcaagatttagtagctaaagatgggaaatattcatttaatctaaagcatggtgacaccataagaatagaaggattaccgacgggatattcttatactctgaaagagactgaagctaaggattatatagtaaccgttgataacaaagttagtcaagaagctcaatcagcaagtgagaatgtcacagcagacaaagaagtcacttttgaaaaccgaaaagatcttgtcccaccaactggtttgacaacagatggggctatctatctttggttgttattacttgttccacttgggttatgggtttggctaattggtcgtaagggactaaaaaatgactaa

SEQ ID NO: 434 - DNA, 1029 bp, Streptococcus pyogenes; identical to SEQ ID NO: 255
  misc_feature 918, 921, 929, 939, 945, 957, 967, 977, 983, 989, 996, 999,1002, 1006, 1017, 1025: n = A,T,C or G

SEQ ID NO: 435 - DNA, 721 bp, Streptococcus pyogenes
  misc_feature 10, 18, 28, 34, 35, 47, 48: n = A,T,C or G
atgacaattntacaggtnatcaataaanccaatnnatactctcattnntatcttttgtttagtcgtactatttttagctggttttggtttgtgggattcttatcatctctatcaacaagcagacgcttctaatttcaaaaaatttaaaacagctcaacaacagcctaaatttgaagacttgttagctttgaatgaggatgtcattggttggttaaatatcccagggactcatattgattatcctctagttcagggaaaaacgaatttagagtatattaataaagcagttgatggcagtgttgccatgtctggtagtttatttttagatacacggaatcataatgattttacggacgattactctctgatttatggccatcatatggcaggtaatgccatgtttggcgaaattccaaaatttttaaaaaaggattttttcaacaaacataataaagctatcgttgaaacaaaagagagaaaaaaactaaccgtcactatttttgcttgtctcaagacagatgcctttgaccagttagtttttaatcctaatgctattaccaatcaagaccaacaaaggcagctcgttgattatatcagtaaaagatcaaaacaatttaaacctgttaaattgaagcatcatacaaagttcgttgctttttcaacgtgtgaaaatttttctactgacaatcgtgttatcgttgtcggtactattcaagaataa

SEQ ID NO: 436 - DNA, 410 bp, Streptococcus pyogenes
aaagacaacactgttcaaactagcattagtgtcgaaaatgtcttagagagagcaggcgatagtaccccattttcgattgcattagaatcaattgatgcgatgaaaacaatagaagaagtaacaattgctggttctggaaaagcaagcttttcccctctgaccttcacaacagttgggcaatatacttatcgtgtttatcagaagccttcacaaaataaagattatcaagcagatactactgtatttgacgttcttgtttatgtgacctatgatgaagatgggactctagtcgcaaaagttatttctcgaagggctggagacgaagaaaaatcagcgattactttaagcccaaacggttagaaaaccaataccgccagacaaccgcaaaaccaataccgccagacaaccgc

SEQ ID NO: 437 - DNA, 190 bp, Streptococcus pyogenes
caaaggcagctcgttgattatatcagtaaaagatcaaaacaatttaaacctgttaaattgaagcatcatacaaagttcgttgctttttcaacgtgtgaaaatttttctactgacaatcgtgttatcgttgtcggtactattcaagaataacgaaaggaggagacttttgagaaaatattggaaaatgtta

SEQ ID NO: 438 - DNA, 402 bp, Streptococcus pyogenes
aaagacagcactgttcaaactagcattagtgtcgaaaatgtcttagagagagcaggcgatagtaccccattttcggttgcattagaatcaattgatgcgatgaaaacaatagacgaaataacaattgctggttctggaaaagcaagcttttcccctctgaccttcacaacagttgggcaatatacttatcgtgtttatcagaagccttcacaaaataaagattatcaagcagatactactgtatttgacgttcttgtctatgtgacctatgatgaagatgggactctagtcgcaaaagttatttctcgaagggctggagacgaagaaaaatcagcgattacttttaagcccaaacggttagtaaaaccaataccgcctagacaacctaacatccctaaaccc

SEQ ID NO: 439 - DNA, 583 bp, Streptococcus pyogenes
gctgaagaaaaatctactgaaactaaaaaaacgtcagtcattattagaaaatatgctgaaggtgactactctaaacttctagagggagcaactttgcgtttaacaggggaagatatcccagattttcaagaaaaagtcttccaaagtaatggaacaggagaaaagattgaattatcaaatgggacttataccttaacagaaacatcatctccagatggatataaaattacggagccgattaagtttagagtagtgaataaaaaagtatttatcgtccaaaaagatggttctcaagtggaaaacccaaacaaagaactaggttctccatatactatagaggcatacaatgattttgatgaatttggcttactgtcaacacaaaattatgcgaaattttattatggaaaaaactatgatggcagttcacaaattgtttattgcttcaatgccaacttgaaatctccacctgactcggaagatcatggtgctacaataaatcctgactttacgactggtgatattaggtacagtcatattgctggttcagatttgataaaatacgctaatacagctagggatgaag

SEQ ID NO: 440 - DNA, 703 bp, Streptococcus pyogenes
  misc_feature 9, 97: n = A,T,C or G
tgaaaatgngtatcataaaaaaggtcaagctattccatataacggtctgactgaggcacagtttcgtgcggctactcaactggcaatttattatttnacagatagtgttgacttaactaaggatagattgaaagacttccatggatttggagatatgaatgatcaaactttgggtgtagctaaaaaaattgtagaatacgctttgagtgatgaagattcaaaactaacaaatcttgatttcttcgtacctaataatagcaaataccaatctcttattgggacagaataccatccagatgatttggttgacgtgattcgtatggaagataaaaagcaagaagttattccagtaactcatagtttgacggtgcaaaaaacagtagtcggtgagttgggagataagactaaaggctttcaatttgaacttgagttgaaagataaaactggacagcctattgttaacactctaaaaactaataatcaagatttagtagctaaagatgggaaatattcatttaatctaaagcatggtgacaccataagaatagaaggattaccgacgggatattcttataccctgaaagagactgaagctaaggattatatagtaactgttgataacaaagttagtcaagaagctcaatcagcaagtgagaatgtcacagcagacaaagaagtcacttttgaaaaccgaaaagatctt

SEQ ID NO: 441 - DNA, 856 bp, Streptococcus pyogenes
  misc_feature 267: n = A,T,C or G
gagacggcaggggttgtaacaggaaaatcactacaagttacaaagacaatgacttatgatgatgaagaggtgttaatgcccgaaaccgcctttacttttactatagagcctgatatgactgcaagtggaaaagaaggcagcctagatattaaaaatggaattgtagaaggcttagacaaacaagtaacagtaaaatataagaatacagataaaacatctcaaaaaactaaaatagcacaatttgatttttctaaggttaaatttccngctataggtgtttaccgctatatggtttcagagaaaaacgataaaaaagacggaattacgtacgatgataaaaagtggactgtagatgtttatgttgggaataaggccaataacgaagaaggtttcgaagttctatatattgtatcaaaagaaggtacttctagtactaaaaaaccaattgaatttacaaactctattaaaactacttccttaaaaattgaaaaacaaataactggcaatgcaggagatcgtaaaaaatcattcaacttcacattaacattacaaccaagtgaatattataaaactggatcagttgtgaaaatcgaacaggatggaagtaaaaaagatgtgacgataggaacgccttacaaatttactttgggacacggtaagagtgtcatgttatcgaaattaccaattggtatcaattactatcttagtgaagacgaagcgaataaagacggctacactacaacggcaacattaaaagaacaaggcaaagaaaagagttccgatttcactttgagtactcaaaaccagaaaacagacgaatctgctgacgaaatcgttgtcacaaataagcgtgaca

SEQ ID NO: 442 - DNA, 752 bp, Streptococcus pyogenes
  misc_feature 109, 132: n = A,T,C or G
gtggaatgcctatcgtgatcgtcaattgttatcaacttatcacaaacaagtgactcaaaagaagccctcagaaatggaggaggtgtggcaaaaggctaaggcgtataangctaggcttgggattcagcccgntccagatgttttttcatttagggatggcattcatgacaaaaattacgaaagcctacttcaaattgaaaacaatgatattatgggatatgttgaagtgccctctattaaagtgacgttacccatataccactatacgacagacgaggtgctaactaagggagcaggtcacttagttggaagtgccttaccagttggtggcgacgggactcacacggttatttctgctcatagaggccttccatcggcagaaatgtttactaatttgaatttagtgaaaaggggagatactttttactttcgtgtgttaaataaagtattggcttataaagttgatcagatactaactgttgaaccagatcaagtcacatctctttctggggtaatgggaaaagattatgctactctggttacctgcacaccatatggtgttaataccaagcgtctattggtcagaggtcatagaattgcatttcattacaaaaagtatcaacaggctaaaaaagcaatgaaactcgtggataaatcaagaatgtggacagaagtagtatgtgctgctttcggggtggttatagctattattttagtatttatgtattcaaagatgactgataaaaaagtga

SEQ ID NO: 443 - DNA, 2176 bp, Streptococcus pyogenes
atgaaatagcattgtgactgtccggtaaagggatgggattgaagattttattcagaaggagagggaatgaataacaaaaaattgcaaaagaagcaagatgctcctcgggtatcaaacagaaagccaaaacaattaactgtcactttagtgggagtatttttaatgctcttagtattgataggatttgaaggaaaagttcgagcagctcacgaattggttgaggtaccagtacctatttttcacaatccagatccacagtcagactatcagtggtatggctatgaagcctatacaagggggtatccgaagtatgatttattcaagacatactatcatgatctgagagtgaatttgcatgggagtaaaagttatcaagtatattgttttaacgttcacaaacactatcctcgttcctcccagagttttgatcggaagtggtataaaaaattagatggaactgctgagaattttgattctcttgctatggaaccaagagttcgtaaagaggagttaaccaaaaaactccgagctgttatgtataatgcctatcctaatgatgctaatggcattataaaagatttagagcctttaaatgctattaaagtcactcaagaggctgtatggtactattctgattcagctcaaattaatccggatgaaagttttaaaacagaagctcaaagtaatggtattaatgaccagcagttaggcttaatgcgaaaagctttaaaagaactaattgatccaaacttagggtcaaaatattcgaataaaactccatcaggttatcggttaaatgtatttgaatctcatgataagactttccaaaatcttttgagtgctgagtatgttccggatactcccccaaaaccaggagaagagcctccggctaaaactgaaaaaacatcagtcattatcagaaaatatgcggaaggtgactactctaaacttctagagggagcaactttgcgtttaacaggggaagatatcccagattttcaagaaaaagtcttccaaagtaatggaacaggagaaaagattgaattatcaaatgggacttataccttaacagaaacatcatctccagatggatataaaattgcggagccgattaagtttagagtagtgaataaaaaagtatttatcgtccaaaaagatggttctcaagtggaaaatccaaacaaagaagtaggttctccatatactatagaggcatacaatgattttgatgaatttggcttactgtcaacacaaaattatgcgaaattttattatggaaaaaactatgatggcagttcacaaattgtttattgcttcaatgccaacttgaaatccccacctgactcggaagatcatggtgctacaataaatcctgactttacgactggtgatattaggtatagtcatattgctggttcagatttgataaaatacgctaatacagctagggatgaagatcctcaattatttttaaaacacgtaaaaaaagtaattgaaaatgggtatcataaaaaaggtcaagctattccatataacggtctgactgaggcacagtttcgcgcggctactcaactggcaatttattattttacagatagtgttgacttaactaaggatagattgaaagacttcccatggatttggagatatgaatgatcaaactttgggtgtagctaaaaaaattgtagaatacgctttgagtgatgaagattcaaaactaacaaatcttgatttcttcgtacctaataatagcaaataccaatctcttattgggacagaataccatcccagatgatttggttgacgtgattcgtatggaagataaaaagcaagaagttattccagtaactcatagtttgacggtgcaaaaaacagtagtcggtgagttgggagataagactaaaggcttccaatttgaacttgagttgaaagataaaactggacagcctattgtcgacgctctaaaaactaataatcaagatttagtagctaaagatgggaaatattcatttaatctaaagcatggtgacaccataagaatagaaggattaccgacgggatattcttatactctgaaagagactgaagctaaggattatatagtaaccgttgataacaaagttagtcaagaagctcaatcagcaagtgagaatgtcacagcagacaaagaagtcac

SEQ ID NO: 444 - DNA, 1056 bp, Streptococcus pyogenes
  misc_feature 332: n = A,T,C or G
atgaaaaaaaacaaattattacttgcaagtacaattttggctactgctttgggaatgaataatttagcatcagctgaagtaaattatgtaaaatcaggagttattgatggtgcaaagttagaaatccataaaacaattaagaattatgatgatgataaagttttaatgccaaatgtgattttcaagtttaatattaagccagatgattcagttgttgctggtaaaaaagaagaaaaatcgggattagatataaaaccaggtatagttgatgggttggaaactagtaaggaagtatcttatacaaatagcgacaaaccaaatagtaaagatanatatacttactttgatttttctcaagtgaaatttactaatgttggtatctatcgctatgttgttgaagaagtacaggatacagtatccggtattcattatgatagtcaaaaatggtatatagacgtttatgttgttgaaggagataatggattcgttccgaaatatattgtatcaagtaaaacattggaaactaaagaaccagttttatttagtaattcatttgatacaacttctttagttgttaaaaaagaggttacaggaaatactggagataaaacgaaaaactttaaattccaattattattaaaagagaatgcttatttctcagcaggtcaaaaagtttcagttacaataacttctgagaaagcttcagaagtcacgactgctaccataggtcaaccacttatctttgagttaaaacacaatgaacaacttaaattggataaattgcctgttggtattacgtatcaaattgatgaaactagtaaaaatagtgacagctacacaacgactgctacaattcaagaaggtgaacaatcacaaaattcttatgttttaaactcagataaggaaactgataaaagtccagatattattacagtcacaaataagcgtgacactcaagttccaactggtgttgtagggacccttgctccatttgcagttcttagcattgtggctactggtggagtgatctatattacaaaacgtaaaaaagcttaa

SEQ ID NO: 445 - DNA, 720 bp, Streptococcus pyogenes
atgacaattgtacaggttatcaataaagtcattgatactctcattcttatcttttgtttagtcgtactatttttagctggttttggtttgtgggattcttatcatctctatcaacaagcagacgcttctaatttcaaaaaatttaaaacagctcaacaacagcctaaatttgaagacttgttagctttgaatgaggatgtcattggttggttaaatatcccggggactcatattgattatcctctagttcagggaaaaacgaatttagagtatattaataaagcagttgatggcagtgttgccatgtctggtagtttatttttagatacacggaatcataatgattttacggacgattactctctgatttatggccatcatatggcaggtaatgccatgtttggcgaaattccaaaatttttaaaaaaggattttttcaacaaacataataaagctatcattgaaacaaaagagagaaaaaaactaaccgtcactatttttgcttgtctcaagacagatgcctttgaccagttagtttttaatcctaatgctattaccaatcaagaccaacaaaggcagctcgttgattatatcagtaaaagatcaaaacaatttaaacctgttaaattgaagcatcatacaaagttcgttgctttttcaacgtgtgaaaatttttctactgacaatcgtgttatcgttgtcggtactattcaagaataa

SEQ ID NO: 446 - DNA, 398 bp, Streptococcus pyogenes
aaagacagcactgttcaaactagcattagtgtcgaaaatgtcttagagagagcaggcgatagtaccccattttcgattgcattagaatcaattgatgcgatgaaaacaatagaagaaataacaattgctggttctggaaaagcaagcttttcccctctgaccttcacaacagttgggcaatatacttatcgtgtttatcagaagccttcacaaaataaagattatcaagcagatactactgtatttgacgttcttgtctatgtgacctatgatgaagatgggactctagtcgcaaaagttatttctcgaagggctggagacgaagaagaatcagcgattacttttaagcccaaacggttagtaaaaccaataccgcctagacaacctaacatcctaac

SEQ ID NO: 447 - DNA, 2175 bp, Streptococcus pyogenes
atgaaatagcattgtgactgtccggtaaagggatgggattgaagattttattcagaaggagagggaatgaataacaaaaaattgcaaaagaagcaagatgctcctcgggtatcaaacagaaagccaaaacaattaactgtcactttagtgggagtatttttaatgctcttagtattgataggatttgaaggaaaagttcgagcagctcacgaattggttgaggtaccagtacctatttttcacaatccagatccacagtcagactatcagtggtatggctatgaagcctatacaagggggtatccgaagtatgatttattcaagacatactatcatgatctgagagtgaatttgcatgggagtaaaagttatcaagtatattgttttaacgttcacaaacactatcctcgttcctcccagagttttgatcggaagtggtataaaaaattagatggaactgctgagaattttgattctcttgctatggaaccaagagttcgtaaagaggagttaaccaaaaaactccgagctgttatgtataatgcctatcctaatgatgctaatggcattataaaagatttagagcctttaaatgctattaaagtcactcaagaggctgtatggtactattctgattcagctcaaattaatccggatgaaagttttaaaacagaagctcaaagtaatggtattaatgaccagcagttaggcttaatgcgaaaagctttaaaagaactaattgatccaaacttagggtcaaaatattcgaataaaactccatcaggttatcggttaaatgtatttgaatctcatgataagactttccaaaatcttttgagtgctgagtatgttccggatactcccccaaaaccaggagaagagcctccggctaaaactgaaaaaacatcagtcattatcagaaaatatgcggaaggtgactactctaaacttctagagggagcaactttgcgtttaacaggggaagatatcccagattttcaagaaaaagtcttccaaagtaatggaacaggagaaaagattgaattatcaaatgggacttataccttaacagaaacatcatctccagatggatataaaattgcggagccgattaagtttagagtagtgaataaaaaagtatttatcgtccaaaaagatggttctcaagtggaaaatccaaacaaagaagtaggttctccatatactatagaggcatacaatgattttgatgaatttggcttactgtcaacacaaaattatgcgaaattttattatggaaaaaactatgatggcagttcacaaattgtttattgcttcaatgccaacttgaaatccccacctgactcggaagatcatggtgctacaataaatcctgactttacgactggtgatattaggtatagtcatattgctggttcagatttgataaaatacgctaatacagctagggatgaagatcctcaattatttttaaaacacgtaaaaaaagtaattgaaaatgggtatcataaaaaaggtcaagctattccatataacggtctgactgaggcacagtttcgcgcggctactcaactggcaatttattattttacagatagtgttgacttaactaaggatagattgaaagacttccatggatttggagatatgaatgatcaaactttgggtgtagctaaaaaaattgtagaatacgctttgagtgatgaagattcaaaactaacaaatcttgatttcttcgtacctaataatagcaaataccaatctcttattgggacagaataccatccagatgatttggttgacgtgattcgtatggaagataaaaagcaagaagttattccagtaactcatagtttgacggtgcaaaaaacagtagtcggtgagttgggagataagactaaaggcttccaatttgaacttgagttgaaagataaaactggacagcctattgtcgacgctctaaaaactaataatcaagatttagtagctaaagatgggaaatattcatttaatctaaagcatggtgacaccataagaatagaaggattaccgacgggatattcttatactctgaaagagactgaagctaaggattatatagtaaccgttgataacaaagttagtcaagaagctcaatcagcaagtgagaatgtcacagcagacaaagaagtcact

SEQ ID NO: 448 - DNA, 1056 bp, Streptococcus pyogenes
atgaaaaaaaacaaattattacttgcaagtacaattttggctactgctttgggaatgaataatttagcatcagctgaagtaaattatgtaaaatcaggagttattgatggtgcaaagttagaaatccataaaacaattaagaattatgatgatgataaagttttaatgccaaatgtgattttcaagtttaatattaagccagatgattcagttgttgctggtaaaaaagaagaaaaatcgggattagatataaaaccaggtatagttgatgggttggaaactagtaaggaagtatcttatacaaatagcgacaaaccaaatagtaaagataaatatacttactttgatttttctcaagtgaaatttactaatgttggtatctatcgctatgttgttgaagaagtacaggatacagtatccggtattcattatgatagtcaaaaatggtatatagacgtttatgttgttgaaggagataatggattcgttccgaaatatattgtatcaagtaaaacattggaaactaaagaaccagttttatttagtaattcatttgatacaacttctttagttgttaaaaaagaggttacaggaaatactggagataaaacgaaaaactttaaattccaattattattaaaagagaatgcttatttctcagcaggtcaaaaagtttcagttacaataacttctgagaaagcttcagaagtcacgactgctaccataggtcaaccacttatctttgagttaaaacacaatgaacaacttaaattggataaattgcctgttggtattacgtatcaaattgatgaaactagtaaaaatagtgacagctacacaacgactgctacaattcaagaaggtgaacaatcacaaaattcttatgttttaaactcagataaggaaactgataaaagtccagatattattacagtcacaaataagcgtgacactcaagttccaactggtgttgtagggacccttgctccatttgcagttcttagcattgtggctactggtggagtgatctatattacaaaacgtaaaaaagcttaa

SEQ ID NO: 449 - DNA, 524 bp, Streptococcus pyogenes
atgatgatgacaattgtacaggttatcaataaagtcattgatactctcattcttatcttttgtttagtcgtactatttttagctggttttggtttgtgggattcttatcatctctatcaacaagcagacgcttctaatttcaaaaaatttaaaacagctcaacaacagcctaaatttgaagacttgttagctttgaatgaggatgtcattggttggttaaatatcccggggactcatattgattatcctctagttcagggaaaaacgaatttagagtatattaataaagcagttgatggcagtgttgccatgtctggtagtttatttttagatacacggaatcataatgattttacggacgattactctctgatttatggccatcatatggcaggtaatgccatgtttggcgaaattccaaaatttttaaaaaaggattttttcaacaaacataataaagctatcattgaaacaaaagagagaaaaaaactaaccgtcactatttttgcttgtctcaagacaga

SEQ ID NO: 450 - DNA, 402 bp, Streptococcus pyogenes
gaagacagcactgttcaaactagcattagtgtcgaaaatgtcttagagagagcaggcgatagtaccccattttcgattgcattagaatcaattgatgcgatgaaaacaatagaagaaataacaattgctggttctggaaaagcaagcttttcccctctgaccttcacaacagttgggcaatatacttatcgtgtttatcagaagccttcacaaaataaagattatcaagcagatactactgtatttgacgttcttgtctatgtgacctatgatgaagatgggactctagtcgcaaaagttatttctcgaagggctggagacgaagaaaaatcagcgattacttttaagcccaaacggttagtaaaaccaataccgcctagacaacctacatccctaaaaccc

SEQ ID NO: 451 - DNA, 2175 bp, Streptococcus pyogenes; identical to SEQ ID NO: 447

SEQ ID NO: 452 - DNA, 1056 bp, Streptococcus pyogenes; identical to SEQ ID NO: 448

SEQ ID NO: 453 - DNA, 524 bp, Streptococcus pyogenes; identical to SEQ ID NO: 449

SEQ ID NO: 454 - DNA, 368 bp, Streptococcus pyogenes
aaagacagcactgttcaaactagcattagtgtcgaaaatgtcttagagagagcaggcgatagtaccccattttcgattgcattagaatcaattgatgcgatgaaaacaatagaagaaataacaattgctggttctggaaaagcaagcttttcccctctgaccttcacaacagttgggcaatatacttatcgtgtttatcagaagccttcacaaaataaagattatcaagcagatactactgtatttgacgttcttgtctatgtgacctatgatgaagatgggactctagtcgcaaaagttatttctcgaagggctggagacgaagaaaaatcagcgattacttttaagcccaaacggttagtaaaacc

SEQ ID NO: 455 - DNA, 2109 bp, Streptococcus pyogenes
  misc_feature 2081: n = A,T,C or G
atgaataacaaaaaattgcaaaagaagcaagatgctcctcgggtatcaaacagaaagccaaaacaattaactgtcactttagtgggagtatttttaatgctcttagtattgataggatttgaaggaaaagttcgagcagctcacgaattggttgaggtaccagtacctatttttcacaatccagatccacagtcagactatcagtggtatggctatgaagcctatacaagggggtatccgaagtatgatttattcaagacatactatcatgatctgagagtgaatttgcatgggagtaaaagttatcaagtatattgttttaacgttcacaaacactatcctcgttcctcccagagttttgatcggaagtggtataaaaaattagatggaactgctgagaattttgattctcttgctatggaaccaagagttcgtaaagaggagttaaccaaaaaactccgagctgttatgtataatgcctatcctaatgatgctaatggcattataaaagatttagagcctttaaatgctattaaagtcactcaagaggctgtatggtactattctgattcagctcaaattaatccggatgaaagttttaaaacagaagctcaaagtaatggtattaatgaccagcagttaggcttaatgcgaaaagctttaaaagaactaattgatccaaacttagggtcaaaatattcgaataaaactccatcaggttatcggttaaatgtatttgaatctcatgataagactttccaaaatcttttgagtgctgagtatgttccggatactcccccaaaaccaggagaagagcctccggctaaaactgaaaaaacatcagtcattatcagaaaatatgcggaaggtgactactctaaacttctagagggagcaactttgcgtttaacaggggaagatatcccagattttcaagaaaaagtcttccaaagtaatggaacaggagaaaagattgaattatcaaatgggacttataccttaacagaaacatcatctccagatggatataaaattgcggagccgattaagtttagagtagtgaataaaaaagtatttatcgtccaaaaagatggttctcaagtggaaaatccaaacaaagaagtaggttctccatatactatagaggcatacaatgattttgatgaatttggcttactgtcaacacaaaattatgcgaaattttattatggaaaaaactatgatggcagttcacaaattgtttattgcttcaatgccaacttgaaatccccacctgactcggaagatcatggtgctacaataaatcctgactttacgactggtgatattaggtatagtcatattgctggttcagatttgataaaatacgctaatacagctagggatgaagatcctcaattatttttaaaacacgtaaaaaaagtaattgaaaatgggtatcataaaaaaggtcaagctattccatataacggtctgactgaggcacagtttcgcgcggctactcaactggcaatttattattttacagatagtgttgacttaactaaggatagattgaaagacttccatggatttggagatatgaatgatcaaactttgggtgtagctaaaaaaattgtagaatacgctttgagtgatgaagattcaaaactaacaaatcttgatttcttcgtacctaataatagcaaataccaatctcttattgggacagaataccatccagatgatttggttgacgtgattcgtatggaagataaaaagcaagaagttattccagtaactcatagtttgacggtgcaaaaaacagtagtcggtgagttgggagataagactaaaggcttccaatttgaacttgagttgaaagataaaactggacagcctattgtcgacgctctaaaaactaataatcaagatttagtagctaaagatgggaaatattcatttaatctaaagcatggtgacaccataagaatagaaggattaccgacgggatattcttatactctgaaagagactgaagctaaggattatatagtaaccgttgataacaaagttagtcaagaagctcaatcagcaagtgngaatgtcacagcagacaaagaagtcact

SEQ ID NO: 456 - DNA, 1056 bp, Streptococcus pyogenes; identical to SEQ ID NO: 448

SEQ ID NO: 457 - DNA, 521 bp, Streptococcus pyogenes
atgatgacaattgtacaggttatcaataaagtcattgatactctcattcttatcttttgtttagtcgtactatttttagctggttttggtttgtgggattcttatcatctctatcaacaagcagacgcttctaatttcaaaaaatttaaaacagctcaacaacagcctaaatttgaagacttgttagctttgaatgaggatgtcattggttggttaaatatcccggggactcatattgattatcctctagttcagggaaaaacgaatttagagtatattaataaagcagttgatggcagtgttgccatgtctggtagtttatttttagatacacggaatcataatgattttacggacgattactctctgatttatggccatcatatggcaggtaatgccatgtttggcgaaattccaaaatttttaaaaaaggattttttcaacaaacataataaagctatcattgaaacaaaagagagaaaaaaactaaccgtcactatttttgcttgtctcaagacaga

SEQ ID NO: 458 - DNA, 402 bp, Streptococcus pyogenes
gaagacagcactgttcaaactagcattagtgtcgaaaatgtcttagagagagcaggcgatagtaccccattttcgattgcattagaatcaattgatgcgatgaaaacaatagaagaaataacaattgctggttctggaaaagcaagcttttcccctctgaccttcacaacagttgggcaatatacttatcgtgtttatcagaagccttcacaaaataaagattatcaagcagatactactgtatttgacgttcttgtctatgtgacctatgatgaagatgggactctagtcgcaaaagttatttctcgaagggctggagacgaagaaaaatcagcgattacttttaagcccaaacggttagtaaaaccaataccgcctagacaacctaacatccctaaaacc

SEQ ID NO: 459 - DNA, 2175 bp, Streptococcus pyogenes
  misc_feature 2147: n = A,T,C or G
atgaaatagcattgtgactgtccggtaaagggatgggattgaagattttattcagaaggagagggaatgaataacaaaaaattgcaaaagaagcaagatgctcctcgggtatcaaacagaaagccaaaacaattaactgtcactttagtgggagtatttttaatgctcttagtattgataggatttgaaggaaaagttcgagcagctcacgaattggttgaggtaccagtacctatttttcacaatccagatccacagtcagactatcagtggtatggctatgaagcctatacaagggggtatccgaagtatgatttattcaagacatactatcatgatctgagagtgaatttgcatgggagtaaaagttatcaagtatattgttttaacgttcacaaacactatcctcgttcctcccagagttttgatcggaagtggtataaaaaattagatggaactgctgagaattttgattctcttgctatggaaccaagagttcgtaaagaggagttaaccaaaaaactccgagctgttatgtataatgcctatcctaatgatgctaatggcattataaaagatttagagcctttaaatgctattaaagtcactcaagaggctgtatggtactattctgattcagctcaaattaatccggatgaaagttttaaaacagaagctcaaagtaatggtattaatgaccagcagttaggcttaatgcgaaaagctttaaaagaactaattgatccaaacttagggtcaaaatattcgaataaaactccatcaggttatcggttaaatgtatttgaatctcatgataagactttccaaaatcttttgagtgctgagtatgttccggatactcccccaaaaccaggagaagagcctccggctaaaactgaaaaaacatcagtcattatcagaaaatatgcggaaggtgactactctaaacttctagagggagcaactttgcgtttaacaggggaagatatcccagattttcaagaaaaagtcttccaaagtaatggaacaggagaaaagattgaattatcaaatgggacttataccttaacagaaacatcatctccagatggatataaaattgcggagccgattaagtttagagtagtgaataaaaaagtatttatcgtccaaaaagatggttctcaagtggaaaatccaaacaaagaagtaggttctccatatactatagaggcatacaatgattttgatgaatttggcttactgtcaacacaaaattatgcgaaattttattatggaaaaaactatgatggcagttcacaaattgtttattgcttcaatgccaacttgaaatccccacctgactcggaagatcatggtgctacaataaatcctgactttacgactggtgatattaggtatagtcatattgctggttcagatttgataaaatacgctaatacagctagggatgaagatcctcaattatttttaaaacacgtaaaaaaagtaattgaaaatgggtatcataaaaaaggtcaagctattccatataacggtctgactgaggcacagtttcgcgcggctactcaactggcaatttattattttacagatagtgttgacttaactaaggatagattgaaagacttccatggatttggagatatgaatgatcaaactttgggtgtagctaaaaaaattgtagaatacgctttgagtgatgaagattcaaaactaacaaatcttgatttcttcgtacctaataatagcaaataccaatctcttattgggacagaataccatccagatgatttggttgacgtgattcgtatggaagataaaaagcaagaagttattccagtaactcatagtttgacggtgcaaaaaacagtagtcggtgagttgggagataagactaaaggcttccaatttgaacttgagttgaaagataaaactggacagcctattgtcgacgctctaaaaactaataatcaagatttagtagctaaagatgggaaatattcatttaatctaaagcatggtgacaccataagaatagaaggattaccgacgggatattcttatactctgaaagagactgaagctaaggattatatagtaaccgttgataacaaagttagtcaagaagctcaatcagcaagtgngaatgtcacagcagacaaagaagtcact

SEQ ID NO: 460 - DNA, 1056 bp, Streptococcus pyogenes
  misc_feature 709: n = A,T,C or G
atgaaaaaaaacaaattattacttgcaagtacaattttggctactgctttgggaatgaataatttagcatcagctgaagtaaattatgtaaaatcaggagttattgatggtgcaaagttagaaatccataaaacaattaagaattatgatgatgataaagttttaatgccaaatgtgattttcaagtttaatattaagccagatgattcagttgttgctggtaaaaaagaagaaaaatcgggattagatataaaaccaggtatagttgatgggttggaaactagtaaggaagtatcttatacaaatagcgacaaaccaaatagtaaagataaatatacttactttgatttttctcaagtgaaatttactaatgttggtatctatcgctatgttgttgaagaagtacaggatacagtatccggtattcattatgatagtcaaaaatggtatatagacgtttatgttgttgaaggagataatggattcgttccgaaatatattgtatcaagtaaaacattggaaactaaagaaccagttttatttagtaattcatttgatacaacttctttagttgttaaaaaagaggttacaggaaatactggagataaaacgaaaaactttaaattccaattattattaaaagagaatgcttatttctcagcaggtcaaaaagtttcagttacaataacttctgagaaagcttcagaantcacgactgctaccataggtcaaccacttatctttgagttaaaacacaatgaacaacttaaattggataaattgcctgttggtattacgtatcaaattgatgaaactagtaaaaatagtgacagctacacaacgactgctacaattcaagaaggtgaacaatcacaaaattcttatgttttaaactcagataaggaaactgataaaagtccagatattattacagtcacaaataagcgtgacactcaagttccaactggtgttgtagggacccttgctccatttgcagttcttagcattgtggctactggtggagtgatctatattacaaaacgtaaaaaagcttaa

SEQ ID NO: 461 - DNA, 528 bp, Streptococcus pyogenes
atgatgatgacaattgtacaggttatcaataaagtcattgatactctcattcttatcttttgtttagtcgtactatttttagctggttttggtttgtgggattcttatcatctctatcaacaagcagacgcttctaatttcaaaaaatttaaaacagctcaacaacagcctaaatttgaagacttgttagctttgaatgaggatgtcattggttggttaaatatcccggggactcatattgattatcctctagttcagggaaaaacgaatttagagtatattaataaagcagttgatggcagtgttgccatgtctggtagtttatttttagatacacggaatcataatgattttacggacgattactctctgatttatggccatcatatggcaggtaatgccatgtttggcgaaattccaaaatttttaaaaaaggattttttcaacaaacataataaagctatcattgaaacaaaagagagaaaaaaactaaccgtcactatttttgcttgtctcaagacagaagcc

SEQ ID NO: 462 - DNA, 405 bp, Streptococcus pyogenes
gaagacagcactgttcaaactagcattagtgtcgaaaatgtcttagagagagcaggcgatagtaccccattttcgattgcattagaatcaattgatgcgatgaaaacaatagaagaaataacaattgctggttctggaaaagcaagcttttcccctctgaccttcacaacagttgggcaatatacttatcgtgtttatcagaagccttcacaaaataaagattatcaagcagatactactgtatttgacgttcttgtctatgtgacctatgatgaagatgggactctagtcgcaaaagttatttctcgaagggctggagacgaagaaaaatcagcgattacttttaagcccaaacggttagtaaaaccaataccgcctagacaacctaacatccctaaaacccca

SEQ ID NO: 463 - DNA, 2158 bp, Streptococcus pyogenes
ctgtccggtaaagggatgggattgaagattttattcagaaggagagggaatgaataacaaaaaattgcaaaagaagcaagatgctcctcgggtatcaaacagaaagccaaaacaattaactgtcactttagtgggagtatttttaatgctcttagtattgataggatttgaaggaaaagttcgagcagctcacgaattggttgaggtaccagtacctatttttcacaatccagatccacagtcagactatcagtggtatggctatgaagcctatacaagggggtatccgaagtatgatttattcaagacatactatcatgatctgagagtgaatttgcatgggagtaaaagttatcaagtatattgttttaacgttcacaaacactatcctcgttcctcccagagttttgatcggaagtggtataaaaaattagatggaactgctgagaattttgattctcttgctatggaaccaagagttcgtaaagaggagttaaccaaaaaactccgagctgttatgtataatgcctatcctaatgatgctaatggcattataaaagatttagagcctttaaatgctattaaagtcactcaagaggctgtatggtactattctgattcagctcaaattaatccggatgaaagttttaaaacagaagctcaaagtaatggtattaatgaccagcagttaggcttaatgcgaaaagctttaaaagaactaattgatccaaacttagggtcaaaatattcgaataaaactccatcaggttatcggttaaatgtatttgaatctcatgataagactttccaaaatcttttgagtgctgagtatgttccggatactcccccaaaaccaggagaagagcctccggctaaaactgaaaaaacatcagtcattatcagaaaatatgcggaaggtgactactctaaacttctagagggagcaactttgcgtttaacaggggaagatatcccagattttcaagaaaaagtcttccaaagtaatggaacaggagaaaagattgaattatcaaatgggacttataccttaacagaaacatcatctccagatggatataaaattgcggagccgattaagtttagagtagtgaataaaaaagtatttatcgtccaaaaagatggttctcaagtggaaaatccaaacaaagaagtaggttctccatatactatagaggcatacaatgattttgatgaatttggcttactgtcaacacaaaattatgcgaaattttattatggaaaaaactatgatggcagttcacaaattgtttattgcttcaatgccaacttgaaatccccacctgactcggaagatcatggtgctacaataaatcctgactttacgactggtgatattaggtatagtcatattgctggttcagatttgataaaatacgctaatacagctagggatgaagatcctcaattatttttaaaacacgtaaaaaaagtaattgaaaatgggtatcataaaaaaggtcaagctattccatataacggtctgactgaggcacagtttcgcgcggctactcaactggcaatttattattttacagatagtgttgacttaactaaggatagattgaaagacttccatggatttggagatatgaatgatcaaactttgggtgtagctaaaaaaattgtagaatacgctttgagtgatgaagattcaaaactaacaaatcttgatttcttcgtacctaataatagcaaataccaatctcttattgggacagaataccatccagatgatttggttgacgtgattcgtatggaagataaaaagcaagaagttattccagtaactcatagtttgacggtgcaaaaaacagtagtcggtgagttgggagataagactaaaggcttccaatttgaacttgagttgaaagataaaactggacagcctattgtcgacgctctaaaaactaataatcaagatttagtagctaaagatgggaaatattcatttaatctaaagcatggtgacaccataagaatagaaggattaccgacgggatattcttatactctgaaagagactgaagctaaggattatatagtaaccgttgataacaaagttagtcaagaagctcaatcagcaagtgagaatgtcacagcagacaaagaagtcact

SEQ ID NO: 464 - DNA, 1056 bp, Streptococcus pyogenes; identical to SEQ ID NO: 448

SEQ ID NO: 465 - DNA, 520 bp, Streptococcus pyogenes
atgatgacaattgtacaggttatcaataaagtcattgatactctcattcttatcttttgtttagtcgtactatttttagctggttttggtttgtgggattcttatcatctctatcaacaagcagacgcttctaatttcaaaaaatttaaaacagctcaacaacagcctaaatttgaagacttgttagctttgaatgaggatgtcattggttggttaaatatcccggggactcatattgattatcctctagttcagggaaaaacgaatttagagtatattaataaagcagttgatggcagtgttgccatgtctggtagtttatttttagatacacggaatcataatgattttacggacgattactctctgatttatggccatcatatggcaggtaatgccatgtttggcgaaattccaaaatttttaaaaaaggattttttcaacaaacataataaagctatcattgaaacaaaagagagaaaaaaactaaccgtcactatttttgcttgtctcaagacag

SEQ ID NO: 466 - DNA, 403 bp, Streptococcus pyogenes
gaagacagcactgttcaaactagcattagtgtcgaaaatgtcttagagagagcaggcgatagtaccccattttcgattgcattagaatcaattgatgcgatgaaaacaatagaagaaataacaattgctggttctggaaaagcaagcttttcccctctgaccttcacaacagttgggcaatatacttatcgtgtttatcagaagccttcacaaaataaagattatcaagcagatactactgtatttgacgttcttgtctatgtgacctatgatgaagatgggactctagtcgcaaaagttatttctcgaagggctggagacgaagaaaaatcagcgattacttttaagcccaaacggttagtaaaaccaataccgcctagacaacctaacatccctaaaaccc

SEQ ID NO: 467 - DNA, 28 bp, Streptococcus pneumoniae
agttgctgctagcgaaacgcctgaaacc

SEQ ID NO: 468 - DNA, 28 bp, Streptococcus pneumoniae
cagttcgctcgagttctctctttggagg

SEQ ID NO: 469 - DNA, 36 bp, Streptococcus pneumoniae
gtgcgtgctagcgctgcaacagtttttgcggctggg

SEQ ID NO: 470 - DNA, 36 bp, Streptococcus pneumoniae
cagcgtctcgagagtgatttttttgttgactacttt

SEQ ID NO: 471 - DNA, 36 bp, Streptococcus pneumoniae
gtgcgtgctagccatgcagtccaagcgcaagaagat

SEQ ID NO: 472 - DNA, 36 bp, Streptococcus pneumoniae
cagcgtctcgagatcaatccgtggtcgcttgttatt

SEQ ID NO: 473 - DNA, 13039 bp, Streptococcus agalactiae
taacacggattggaaataacatcaatcaaattgcgcgtgctatcaaccaaagccatctaatttctcaggctcagtatcactttcatcgagaagcacgttaagcccaacagcagggggggttgctctgattcggttaagtaataagcaaaatcctcaccaattttcccagtaataagaggcgttgttgaggtatagggattacctgtgccatagtcgatgatggtcacaaaatgaccattccccataaaagggccaaccaaaacttcacctgtggtttggatgtacccctccgttttttgatgtcaacaccagtattttggatgtaccccttaacatgccctttggtatctgcaacagagataatatgaccaaaggaagaatcaccgatgactttaaccgtaatcttgctatcgcctttttgattagccgctaatatttgattagcaatcagggtgcgaccaagagcaactgttgaagacgacaaggtatgatgtttttcctgagccaatttaacagtctcggtgctatcgaggacataagacctgaaggcaccagaggcagaaattgatttaataattttatccataacctatgttatagcacaaagagagagtttgtatggactggattagctgaaaattttagactaaaaagtagtgccagtggattttgaaaggtaacaaaagagtcttccgtttaaacgagaaggctgtttttagtcgtttcagatgaaggcaaaaggacgatgaaataattccgtaccttcatggattgctatgttactggcatgaggtctcacgatatttagtaagatattcgtttgaagatattcccacgtattttttaaaggttttaagaaaatgtgtggtgtcgtaaaaatgtaataatttcgctacttccccaatcggtacccctctttgcagtagtaattgtccctccttaatttttgcctttagaatataactttgcaaggaaatgtcagagtattttttaaaaactgagcgtaagtgggaatctgagatatataggtagttggcaatatcagatactttgagtttggagtagaggtggttgtccacataatggagaatactattgtacatttgctgcttgtcagagatgctcttattggttaaggattctgaaaaatcaataagagctgcacagcgaattcttgaaacatcaataagatcaggagcctcttcgtttaaagccatatagtgctttaccagcgcataacttttagccacatcagtattttcctcgaaacttaattctagtaattttgttaagtaaacaacagttaagttcttttcagctcttagggcagggattgaagatgaggtaacactggatgatgggaggcgattaatttcttgctttaacagttgagtgttacccagcttaacgagatcaataatgtgattgagatggtttaaaacagtgggtaactgaaaagagtttttcttagtatgttttaggtgaagaacaatatcaggatccgcaacaatctgttctgactcttctaataaatgattgatggcttgttggcaactagcctcaaactgtgtttggaaaaaggcatcgatagacacaagaagactacgtatactggtagtaggaaaacaagggacaagctttatataggataagatttcttttttactgattttgttaaaatattacgatgagaaaattgttctagaaagcgactggataactgttcttgcctattgatatcagggctatagggataaaatggtccaatagcaataagatattgacagacaggaaaaattaagaatgattcttcaaaaagaccctcataaacagtgatatcttggttataagggatagctaaatgttttaaaaactgatagtaaggcaacagatagtcttcgttaccatataactgaacgagttccttgtctcgtgacatgactgaaataggtagttgagatatggtatgcaatgtttgaacatgtttaaaatcgaatgtaaccatttgatagaccgccttcattatcatttctagaatttttctttaggtttgtaaagactacaaaataaaatgatgaaaacaactatcttgtggatacactaaaaagacacgctaattagcaaactctctcttcatcatctctcaccattattatactactatttatatgacaaataaaggtgattttgttaaaaatataactttgaaaatccacatatatttttaatcttccgtctgaaaaaataaataaaaatagtaaaaataaacacgaatttaaaataagcaaattttttaagaaaatctgtgctaaactttaatagttttgtgcttaataataatcagcacttacaaagaacaaagggaaaagcgaggagagaacttttaatgaaattatcgaagaagttattgttttcggctgctgttttaacaatggtggcggggtcaactgttgaaccagtagctcagtttgcgactggaatgagtattgtaagagctgcagaagtgtcacaagaacgcccagcgaaaacaacagtaaatatctataaattacaagctgatagttataaatcggaaattacttctaatggtggtatcgagaataaagacggcgaagtaatatctaactatgctaaacttggtgacaatgtaaaaggtttgcaaggtgtacagtttaaacgttataaagtcaagacggatatttctgttgatgaattgaaaaaattgacaacagttgaagcagcagatgcaaaagttggaacgattcttgaagaaggtgtcagtctacctcaaaaaactaatgctcaaggtttggtcgtcgatgctctggattcaaaaagtaatgtgagatacttgtatgtagaagatttaaagaattcaccttcaaacattaccaaagcttatgctgtaccgtttgtgttggaattaccagttgctaactctacaggtacaggtttcctttctgaaattaatatttaccctaaaaacgttgtaactgatgaaccaaaaacagataaagatgttaaaaaattaggtcaggacgatgcaggttatacgattggtgaagaattcaaatggttcttgaaatctacaatccctgccaatttaggtgactatgaaaaatttgaaattactgataaatttgcagatggcttgacttataaatctgttggaaaaatcaagattggttcgaaaacactgaatagagatgagcactacactattgatgaaccaacagttgataaccaaaatacattaaaaattacgtttaaaccagagaaatttaaagaaattgctgagctacttaaaggaatgacccttgttaaaaatcaagatgctcttgataaagctactgcaaatacagatgatgcggcatttttggaaattccagttgcatcaactattaatgaaaaagcagttttaggaaaagcaattgaaaatacttttgaacttcaatatgaccatactcctgataaagctgacaatccaaaaccatctaatcctccaagaaaaccagaagttcatactggtgggaaacgatttgtaaagaaagactcaacagaaacacaaacactaggtggtgctgagtttgatttgttggcttctgatgggacagcagtaaaatggacagatgctcttattaaagcgaatactaataaaaactatattgctggagaagctgttactgggcaaccaatcaaattgaaatcacatacagacggtacgtttgagattaaaggtttggcttatgcagttgatgcgaatgcagagggtacagcagtaacttacaaattaaaagaaacaaaagcaccagaaggttatgtaatccctgataaagaaatcgagtttacagtatcacaaacatcttataatacaaaaccaactgacatcacggttgatagtgctgatgcaacacctgatacaattaaaaacaacaaacgtccttcaatccctaatactggtggtattggtacggctatctttgtcgctatcggtgctgcggtgatggcttttgctgttaaggggatgaagcgtcgtacaaaagataactaaataaaaggctacttcttaagtaaccatgtttaagaaaagagaaatagccttatttctctttttgtcgtttttaaaataaaggaacatcatgaaacaaacattaaaacttatgttttcttttctgttgatgttagggactatgtttggaattagccaaactgttttagcgcaagaaactcatcagttgacgattgttcatcttgaagcaagggatattgatcgtccaaatccacagttggagattgcccctaaagaagggactccaattgaaggagtactctatcagttgtaccaattaaaatcaactgaagatggcgatttgttggcacattggaattccctaactatcacagaattgaaaaaacaggcgcagcaggtttttgaagccactactaatcaacaaggaaaggctacatttaaccaactaccagatggaatttattatggtctggcggttaaagccggtgaaaaaaatcgtaatgtctcagctttcttggttgacttgtctgaggataaagtgatttatcctaaaatcatctggtccacaggtgagttggacttgcttaaagttggtgtggatggtgataccaaaaaaccactagcaggcgttgtctttgaactttatgaaaagaatggtaggactcctattcgtgtgaaaaatggggtgcattctcaagatattgacgctgcaaaacatttagaaacagattcatcagggcatatcagaatttccgggctcatccatggggactatgtcttaaaagaaatcgagacacagtcaggatatcagatcggacaggcagagactgctgtgactattgaaaaatcaaaaacagtaacagtaacgattgaaaataaaaaagttccgacacctaaagtgccatctcgaggaggtcttattcccaaaacaggtgagcaacaggcaatggcacttgtaattattggtggtattttaattgctttagccttacgattactatcaaaacatcggaaacatcaaaataaggattagcatgggacaaaaatcaaaaatatctctagctacgaatattcgtatatggatttttcgtttaattttcttagcgggtttccttgttttggcatttcccatcgttagtcaggtcatgtactttcaagcctctcacgccaatattaatgcttttaaagaagctgttaccaagattgaccgggtggagattaatcggcgtttagaacttgcttatgcttataacgccagtatagcaggtgccaaaactaatggcgaatatccagcgcttaaagacccctactctgctgaacaaaagcaggcaggggtcgttgagtacgcccgcatgcttgaagtcaaagaacaaataggtcatgtgattattccaagaattaatcaggatatccctatttacgctggctctgctgaagaaaatcttcagaggggcgttggacatttagaggggaccagtcttccagtcggtggtgagtcaactcatgccgttctaactgcccatcgagggctaccaacggccaagctatttaccaatttagacaaggtaacagtaggtgaccgtttttacattgaacacatcggcggaaagattgcttatcaggtagaccaaatcaaagttatcgcccctgatcagttagaggatttgtacgtgattcaaggagaagatcacgtcaccctattaacttgcacaccttatatgataaatagtcatcgcctcctcgttcgaggcaagcgaattccttatgtggaaaaaacagtgcagaaagattcaaagaccttcaggcaacaacaatacctaacctatgctatgtgggtagtcgttggacttatcttgctgtcgcttctcatttggtttaaaaagacgaaacagaaaaagcggagaaagaatgaaaaagcggctagtcaaaatagtcacaataattcgaaataataaaatcagaaccctcatttttgtgatgggaagtctgattctcttatttccgattgtgagccaggtaagttactaccttgcttcgcatcaaaatattaatcaatttaagcgggaagtcgctaagattgatactaatacggttgaacgacgcatcgctttagctaatgcttacaatgagacgttatcaaggaatcccttgcttatagacccttttaccagtaagcaaaaagaaggtttgagagagtatgctcgtatgcttgaagttcatgagcaaataggtcatgtggcaatcccaagtattggggttgatattccaatttatgctggaacatccgaaactgtgcttcagaaaggtagtgggcatttggagggaaccagtcttccagtgggaggtttgtcaacccattcagtactaactgcccaccgtggcttgccaacagctaggctatttaccgacttaaataaagttaaaaaaggccagattttctatgtgacgaacatcaaggaaacacttgcctacaaagtcgtgtctatcaaagttgtggatccaacagctttaagtgaggttaagattgtcaatggtaaggattatataaccttgctgacttgcacaccttacatgatcaatagtcatcgtctcttggtaaaaggagagcgtattccttatgattctaccgaggcggaaaagcacaaagaacaaaccgtacaagattatcgtttgtcactagtgttgaagatactactagtattattaattggactcttcatcgtgataatgatgagaagatggatgcaacatcgtcaataacgatgttgtgaatggcttacttacttatcaaataggtgactaatgatgattgtgaataatggttatctagaagggagaaaaatgaaaaagagacaaaaaatatggagagggttatcagttactttactaatcctgtcccaaattccatttggtatattggtacaaggtgaaacccaagataccaatcaagcacttggaaaagtaattgttaaaaaaacgggagacaatgctacaccattaggcaaagcgacttttgtgttaaaaaatgacaatgataagtcagaaacaagtcacgaaacggtagagggttctggagaagcaacctttgaaaacataaaacctggagactacacattaagagaagaaacagcaccaattggttataaaaaaactgataaaacctggaaagttaaagttgcagataacggagcaacaataatcgagggtatggatgcagataaagcagagaaacgaaaagaagttttgaatgcccaatatccaaaatcagctatttatgaggatacaaaagaaaattacccattagttaatgtagagggttccaaagttggtgaacaatacaaagcattgaatccaataaatggaaaagatggtcgaagagagattgctgaaggttggttatcaaaaaaaattacaggggtcaatgatctcgataagaataaatataaaattgaattaactgttgagggtaaaaccactgttgaaacgaaagaacttaatcaaccactagatgtcgttgtgctattagataattcaaatagtatgaataatgaaagagccaataattctcaaagagcattaaaagctggggaagcagttgaaaagctgattgataaaattacatcaaataaagacaatagagtagctcttgtgacatatgcctcaaccatttttgatggtactgaagcgaccgtatcaaagggagttgccgatcaaaatggtaaagcgctgaatgatagtgtatcatgggattatcataaaactacttttacagcaactacacataattacagttatttaaatttaacaaatgatgctaacgaagttaatattctaaagtcaagaattccaaaggaagcggagcatataaatggggatcgcacgctctatcaatttggtgcgacatttactcaaaaagctctaatgaaagcaaatgaaattttagagacacaaagttctaatgctagaaaaaaacttatttttcacgtaactgatggtgtccctacgatgtcttatgccataaattttaatccttatatatcaacatcttaccaaaaccagtttaattcttttttaaataaaataccagatagaagtggtattctccaagaggattttataatcaatggtgatgattatcaaatagtaaaaggagatggagagagttttaaactgttttcggatagaaaagttcctgttactggaggaacgacacaagcagcttatcgagtaccgcaaaatcaactctctgtaatgagtaatgagggatatgcaattaatagtggatatatttatctctattggagagattacaactgggtctatccatttgatcctaagacaaagaaagtttctgcaacgaaacaaatcaaaactcatggtgagccaacaacattatactttaatggaaatataagacctaaaggttatgacatttttactgttgggattggtgtaaacggagatcctggtgcaactcctcttgaagctgagaaatttatgcaatcaatatcaagtaaaacagaaaattatactaatgttgatgatacaaataaaatttatgatgagctaaataaatactttaaaacaattgttgaggaaaaacattctattgttgatggaaatgtgactgatcctatgggagagatgattgaattccaattaaaaaatggtcaaagttttacacatgatgattacgttttggttggaaatgatggcagtcaattaaaaaatggtgtggctcttggtggaccaaacagtgatgggggaattttaaaagatgttacagtgacttatgataagacatctcaaaccatcaaaatcaatcatttgaacttaggaagtggacaaaaagtagttcttacctatgatgtacgtttaaaagataactatataagtaacaaattttacaatacaaataatcgtacaacgctaagtccgaagagtgaaaaagaaccaaatactattcgtgatttcccaattcccaaaattcgtgatgttcgtgagtttccggtactaaccatcagtaatcagaagaaaatgggtgaggttgaatttattaaagttaataaagacaaacattcagaatcgcttttgggagctaagtttcaacttcagatagaaaaagatttttctgggtataagcaatttgttccagagggaagtgatgttacaacaaagaatgatggtaaaatttattttaaagcacttcaagatggtaactataaattatatgaaatttcaagtccagatggctatatagaggttaaaacgaaacctgttgtgacatttacaattcaaaatggagaagttacgaacctgaaagcagatccaaatgctaataaaaatcaaatcgggtatcttgaaggaaatggtaaacatcttattaccaacactcccaaacgcccaccaggtgtttttcctaaaacagggggaattggtacaattgtctatatattagttggttctacttttatgatacttaccatttgttctttccgtcgtaaacaattgtaaggtgtcgttgaaattattaaataatagaaaatgactagttttggcctttccctattgtcagtcagattagttattatcaagcttctcatgccaatattaatgcctttaaaagaacagttacaaccattgaccgtacggagattcaacgacggttaggtctggctaaagcctacaatgctagtatttctggaacaagtagtcagtcgactcaatctgtgctgagagattcttattctgaggagcaaaaaaggcagggtggactgaatacgctaggatgttagaagtcagagagcaggttgaccatgtgatgattccaaaaatcaatcaggatttaccaatctacgctggttcagaagaggacaatctgcaacggggagttggtcatctagaagggataagtttgccgattggaggggcttctacacatgcggtcttgagcggtcaaagaggtatgccagctgctcggttgtttgcggatttggataagatgaaaaaaggtgattatttttatgttaccaatctgaaagaaaccttggcttatcaagtggatcgtatcatggtgattgaacctagccaattggatgccgtgagcattgaagaggataaagattatgttacccttctgacctgtacaccttatatgggctctttgtcaactgtaatgggtgacttatcattaacaacgagagagaatcagcttggttctctctctttttggatgttcaaagcgatgagaattttgcttttaaaatttttaaagttgcgaaagccaaaggcttgtcgcttgatgtctttgataagcttgttggtcgcttctaatttggcattggaaagggatagctgagggcgtttgtgatgtaagttttgtacttcatgaaggtcctaaagaccattttaaaagcagaattgccagttgttacgttatcatctatgaagctaaagaattcagttgttcgcttttcttagaaatgaaagagtatgagctgataaaggtcgttataatagcggagctcatctgagaaaacttttatacctcaaagtcagtctagctttgatatcatgaagccattaggagttattccttatcttttagtggcgcgcgatccatatagtgatagatcgagatatttagatccaaaagttctatcatcctcttttggcgccttttttccagcagataatattaaggtagcttggtctaacaactccagcactttatttacaccacctattaatgcaaactacaccactcagattcaagctattgggacaacgattaagtcacaaattccggaatcgattttgacggttacggataaaaagagcaggaagttcagcattaacaagattgacgaagctaaagaaggcttagtaggtgcgaccttcaccttgtctaaacgcacaacagtagcggcagatcatcaagtacaaggagatttcattcctgtcagcaaagagacgacagtcggtcggacaacccttacctttgacaaccttaaacctggattttatgaccttaaagaaacgaaagcgccgaatgcttacgtacttgatcctaagacttatgttgtggtcgttcaaaattcaggaaaaacgacaattgtggatgaagctaacttcaaagaggctgattacccaatggctgataataccagccatgtggagtgcgtagcgttgctacaacgaagcaaagggtaaaaatcctttattttaagcactttttcaagcattttgtctttattgaaaagagtgattttaacataaaaaaggtattaaaaaacatattgacgtgaccgtttgttttgaagtggcttgcgtagacaaaaaaatagatacgtcagataaatttctggcattacgagaacatttttagagtgttctctttttttagtttacggaggaaaaatatatatggaaaaacaggattcacgagttctcatccattgggaggggaattctggggacaagctcattgaacaccaaaccagcgcaacggggtggtactaccaagtcgatcgtagctttagtcaaccaaaaggggaaccgcccagaatgatccaaaggcactagaaagtgtccgtaatgattcgatttcgggcggtgatgatgtcatgggttatgcttatagcaaatgtacttggggagttgcggcacgaattaatcagtgggactgaaactcaaaggttgaaatggtgagaagattaccattaccagttcaatgggaaatggtcaggattgggttggaacagccgaaagactagatggtgaaactgatacagttccaaaagaaggtactattctctctttttaggaaagtagttatggttcgtatataggctacggaactatatctttcgtcacattacatctacagatagtaccatgaattttgcttatatgaccaagtaaagtgaggatatactaacaaatgaaatatttattatcgtatttgtccattttatcgaaaagtttgcatattatcattatgtttgataagatgcaaatataatgatagtaggagctaaatatggatatttaaaaaatcaagagtatcctaagtgctttccattttgaaattcaaatatagctaatagttctagaacttctaattgtttttcgtcgacgatatgaattttcaatcttaactgttaggattccacctccctttggttaaagaaaaaaggtcaggtcgtttagataactttgtcaaacaagctcaagctatctaaaaatagtttgaaatgggcattactctagtttttaataagctatctgatgagcagaaggagaagttaatgcatgttgggaagtcttattttgactatcaagaaaatgctcttatcccacaattaggttttctatattctaaattaactaaaaaaattgaacttgataatcggttgtctccgactgaacaaaagttattgattaccttattattacatactaaaggtttaatcattgatatgtaagaagtaagtcagctaaccgatctttctattctaaaacttatattgttgctttagaaattttaaagagcgtggatggcttcataataaacagaaatcttaccaatttgcgaagccaaaaaatatgatatttgaagagtccaaagatctaatagatagtccagttagagaagcgttgattataagtgataaggattttcaaaaattaaaacaagagctattattttaaccgacttattttaaagacttatcatatctaggcttgcttgatgattcggaaaaatacggagactatactatttcaaggaaaagatacaaaagtttcgaatcaagtcttcaactatacatccttcaaagtcatcggctagagatttggaattatgaaccaatccctttgattactagaaaaataaatagcttggagaggctaacgtgacactggttgatccaatctcgctttatttaacactaagaatgatgaagaccctcgtattgaagaagaagttgagcagctagaagataagat

SEQ ID NO: 474 - DNA, 13001 bp, Streptococcus agalactiae
taacacggattggaaataacatcaatcaaattgcgcgtgctatcaaccaaagccatctaatttctcaggctcagtatcactttcatcgagaagcacgttaagcccaacagcaggggggttgctctgattcggttaagtaataagcaaaatcctcaccaattttcccagtaataagaggcgttgttgaggtatagggattacctgtgccatagtcgatgatggtcacaaaatgaccattccccataaaagggccaaccaaaacttcacctgtgaccgttttttgatgtcaacaccagtattttggatgtaccccttaacatgccctttggtatctgcaacagagataatatgaccaaaggaagaatcaccgatgactttaaccgtaatcttgctatcgcctttttgattagccgctaatatttgattagcaatcagggtgcgaccaagagcaactgttgaagacgacaaggtatgatgtttttcctgagccaatttaacagtctcggtgctatcgaggacataagacctgaaggcaccagaggcagaaattgatttaataattttatccataacctatgttatagcacaaagagagagtttgtatggactggattagctgaaaattttagactaaaaagtagtgccagtggattttgaaaggtaacaaaagagtcttccgtttaaacgagaaggctctttttagtcgtttcagatgaaggcaaaaggacgatgaaataattccgtaccttcatggattgctatgttactggcatgaggtctcacgatatttagtaagatattcgtttgaagatattcccacgtattttttaaaggttttaagaaaatgtgtggtgtcgtaaaaatgtaataatttcgctacttccccaatcggtacccctctttgcagtagtaattgtccctccttaatttttgcctttagaatataactttgcaaggaaatgtcagagtattttttaaaaactgagcgtaagtgggaatctgagatatataggtagttggcaatatcagatactttgagtttggagtagaggtggttgtccacataatggagaatactattgtacatttgctgcttgtcagagatgctcttattggttaaggattctgaaaaatcaataagagctgcacagcgaattcttgaaacatcaataagatcaggagcctcttcgtttaaagccatatagtgctttaccagcgcataacttttagccacatcagtattttcctcgaaacttaattctagtaattttgttaagtaaacaacagttaagttcttttcagctcttagggcagggattgaagatgaggtaacactggatgatgggaggcgattaatttcttgctttaacagttgagtgttacccagcttaacgagatcaataatgtgattgagatggtttaaaacagtgggtaactgaaaagagtttttcttagtatgttttaggtgaagaacaatatcaggatccgcaacaatctgttctgactcttctaataaatgattgatgacttgttggcaactagcctcaaactgtgtttggaaaaaggcatcgatagacacaagaagactacgtatactggtagtaggaaaacaagggacaagctttatataggataagatttcttttttattacgatgagaaaattgttctagaaagcgactggataactgttcttgcctattgatatcagggctatagggataaaatggtccaatagcaataagatattgacagacaggaaaaattaagaatgattcttcaaaaagaccctcataaacagtgatatcttggttataagggatagctaaatgttttaaaaactgatagtaaggcaacagatagtcttcgttaccatataactgaacgagttccttgtctcgtgacatgactgaaataggtagttgagatatggtatgcaatgtttgaacatgtttaaaatcgaatgtaaccatttgatagaccgccttcattatcatttctagaatttttctttaggtttgtaaagactacaaaataaaatgatgaaaacaactatcttgtggatacactaaaaagacacgctaattagcaaactctctcttcatcatctctcaccattattatactactatttatatgacaaataaaggtgattttgttaaaatataactttgaaaatccacatatatttttaatcttccgtctgaaaaaataaataaaaatagtaaaaataaacacgaatttaaaataagcaaattttttaagaaaatctgtgctaaactttaatagttttgtgcttaataataatcagcacttacaaagaacaaagggaaaagcgaggagagaacttttaatgaaattatcgaagaagttattgttttcggctgctgttttaacaatggtggcggggtcaactgttgaaccagtagctcagtttgcgactggaatgagtattgtaagagctgcagaagtgtcacaagaacgcccagcgaaaacaacagtaaatatctataaattacaagctgatagttataaatcggaaattacttctaatggtggtatcgagaataaagacggcgaagtaatatctaactatgctaaacttggtgacaatgtaaaaggtttgcaaggtgtacagtttaaacgttataaagtcaagacggatatttctgttgatgaattgaaaaaattgacaacagttgaagcagcagatgcaaaagttggaacgattcttgaagaaggtgtcagtctacctcaaaaaactaatgctcaaggtttggtcgtcgatgctctggattcaaaaagtaatgtgagatacttgtatgtagaagatttaaagaattcaccttcaaacattaccaaagcttatgctgtaccgtttgtgttggaattaccagttgctaactctacaggtacaggtttcctttctgaaattaatatttaccctaaaaacgttgtaactgatgaaccaaaaacagataaagatgttaaaaaattaggtcaggacgatgcaggttatacgattggtgaagaattcaaatggttcttgaaatctacaatccctgccaatttaggtgactatgaaaaatttgaaattactgataaatttgcagatggcttgacttataaatctgttggaaaaatcaagattggttcgaaaacactgaatagagatgagcactacactattgatgaaccaacagttgataaccaaaatacattaaaaattacgtttaaaccagagaaatttaaagaaattgctgagctacttaaaggaatgacccttgttaaaaatcaagatgctcttgataaagctactgcaaatacagatgatgcggcatttttggaaattccagttgcatcaactattaatgaaaaagcagttttaggaaaagcaattgaaaatacttttgaacttcaatatgaccatactcctgataaagctgacaatccaaaaccatctaatcctccaagaaaaccagaagttcatactggtgggaaacgatttgtaaagaaagactcaacagaaacacaaacactaggtggtgctgagtttgatttgttggcttctgatgggacagcagtaaaatggacagatgctcttattaaagcgaatactaataaaaactatattgctggagaagctgttactgggcaaccaatcaaattgaaatcacatacagacggtacgtttgagattaaaggtttggcttatgcagttgatgcgaatgcagagggtacagcagtaacttacaaattaaaagaaacaaaagcaccagaaggttatgtaatccctgataaagaaatcgagtttacagtatcacaaacatcttataatacaaaaccaactgacatcacggttgatagtgctgatgcaacacctgatacaattaaaaacaacaaacgtccttcaatccctaatactggtggtattggtacggctatctttgtcgctatcggtgctgcggtgatggcttttgctgttaaggggatgaagcgtcgtacaaaagataactaaataaaaggctacttcttaagtaaccatgtttaagaaaagagaaatagccttatttctctttttgtcgtttttaaaataaaggaacatcatgaaacaaacattaaaacttatgttttcttttctgttgatgttagggactatgtttggaattagccaaactgttttagcgcaagaaactcatcagttgacgattgttcatcttgaagcaagggatattgatcgtccaaatccacagttggagattgcccctaaagaagggactccaattgaaggagtactctatcagttgtaccaattaaaatcaactgaagatggcgatttgttggcacattggaattccctaactatcacagaattgaaaaaacaggcgcagcaggtttttgaagccactactaatcaacaaggaaaggctacatttaaccaactaccagatggaatttattatggtctggcggttaaagccggtgaaaaaaatcgtaatgtctcagctttcttggttgacttgtctgaggataaagtgatttatcctaaaatcatctggtccacaggtgagttggacttgcttaaagttggtgtggatggtgataccaaaaaaccactagcaggcgttgtctttgaactttatgaaaagaatggtaggactcctattcgtgtgaaaaatggggtgcattctcaagatattgacgctgcaaaacatttagaaacagattcatcagggcatatcagaatttccgggctcatccatggggactatgtcttaaaagaaatcgagacacagtcaggatatcagatcggacaggcagagactgctgtgactattgaaaaatcaaaaacagtaacagtaacgattgaaaataaaaaagttccgacacctaaagtgccatctcgaggaggtcttattcccaaaacaggtgagcaacaggcaatggcacttgtaattattggtggtattttaattgctttagccttacgattactatcaaaacatcggaaacatcaaaataaggattagcatgggacaaaaatcaaaaatatctctagctacgaatattcgtatatggatttttcgtttaattttcttagcgggtttccttgttttggcatttcccatcgttagtcaggtcatgtactttcaagcctctcacgccaatattaatgcttttaaagaagctgttaccaagattgaccgggtggagattaatcggcgtttagaacttgcttatgcttataacgccagtatagcaggtgccaaaactaatggcgaatatccagcgcttaaagacccctactctgctgaacaaaagcaggcaggggtcgttgagtacgcccgcatgcttgaagtcaaagaacaaataggtcatgtgattattccaagaattaatcaggatatccctatttacgctggctctgctgaagaaaatcttcagaggggcgttggacatttagaggggaccagtcttccagtcggtggtgagtcaactcatgccgttctaactgcccatcgagggctaccaacggccaagctatttaccaatttagacaaggtaacagtaggtgaccgtttttacattgaacacatcggcggaaagattgcttatcaggtagaccaaatcaaagttatcgcccctgatcagttagaggatttgtacgtgattcaaggagaagatcacgtcaccctattaacttgcacaccttatatgataaatagtcatcgcctcctcgttcgaggcaagcgaattccttatgtggaaaaaacagtgcagaaagattcaaagaccttcaggcaacaacaatacctaacctatgctatgtgggtagtcgttggacttatcttgctgtcgcttctcatttggtttaaaaagacgaaacagaaaaagcggagaaagaatgaaaaagcggctagtcaaaatagtcacaataattcgaaataataaaatcagaaccctcatttttgtgatgggaagtctgattctcttatttccgattgtgagccaggtaagttactaccttgcttcgcatcaaaatattaatcaatttaagcgggaagtcgctaagattgatactaatacggttgaacgacgcatcgctttagctaatgcttacaatgagacgttatcaaggaatcccttgcttatagacccttttaccagtaagcaaaaagaaggtttgagagagtatgctcgtatgcttgaagttcatgagcaaataggtcatgtggcaatcccaagtattggggttgatattccaatttatgctggaacatccgaaactgtgcttcagaaaggtagtgggcatttggagggaaccagtcttccagtgggaggtttgtcaacccattcagtactaactgcccaccgtggcttgccaacagctaggctatttaccgacttaaataaagttaaaaaaggccagattttctatgtgacgaacatcaaggaaacacttgcctacaaagtcgtgtctatcaaagttgtggatccaacagctttaagtgaggttaagattgtcaatggtaaggattatataaccttgctgacttgcacaccttacatgatcaatagtcatcgtctcttggtaaaaggagagcgtattccttatgattctaccgaggcggaaaagcacaaagaacaaaccgtacaagattatcgtttgtcactagtgttgaagatactactagtattattaattggactcttcatcgtgataatgatgagaagatggatgcaacatcgtcaataacgatgttgtgaatggcttacttatcaaataggtgactaatgatgattgtgaataatggttatctagaagggagaaaaatgaaaaagagacaaaaaatatggagagggttatcagttactttactaatcctgtcccaaattccatttggtatattggtacaaggtgaaacccaagataccaatcaagcacttggaaaagtaattgttaaaaaaacgggagacaatgctacaccattaggcaaagcgacttttgtgttaaaaaatgacaatgataagtcagaaacaagtcacgaaacggtagagggttctggagaagcaacctttgaaaacataaaacctggagactacacattaagagaagaaacagcaccaattggttataaaaaaactgataaaacctggaaagttaaagttgcagataacggagcaacaataatcgagggtatggatgcagataaagcagagaaacgaaaagaagttttgaatgcccaatatccaaaatcagctatttatgaggatacaaaagaaaattacccattagttaatgtagagggttccaaagttggtgaacaatacaaagcattgaatccaataaatggaaaagatggtcgaagagagattgctgaaggttggttatcaaaaaaaattacaggggtcaatgatctcgataagaataaatataaaattgaattaactgttgagggtaaaaccactgttgaaacgaaagaacttaatcaaccactagatgtcgttgtgctattagataattcaaatagtatgaataatgaaagagccaataattctcaaagagcattaaaagctggggaagcagttgaaaagctgattgataaaattacatcaaataaagacaatagagtagctcttgtgacatatgcctcaaccatttttgatggtactgaagcgaccgtatcaaagggagttgccgatcaaaatggtaaagcgctgaatgatagtgtatcatgggattatcataaaactacttttacagcaactacacataattacagttatttaaatttaacaaatgatgctaacgaagttaatattctaaagtcaagaattccaaaggaagcggagcatataaatggggatcgcacgctctatcaatttggtgcgacatttactcaaaaagctctaatgaaagcaaatgaaattttagagacacaaagttctaatgctagaaaaaaacttatttttcacgtaactgatggtgtccctacgatgtcttatgccataaattttaatccttatatatcaacatcttaccaaaaccagtttaattcttttttaaataaaataccagatagaagtggtattctccaagaggattttataatcaatggtgatgattatcaaatagtaaaaggagatggagagagttttaaactgttttcggatagaaaagttcctgttactggaggaacgacacaagcagcttatcgagtaccgcaaaatcaactctctgtaatgagtaatgagggatatgcaattaatagtggatatatttatctctattggagagattacaactgggtctatccatttgatcctaagacaaagaaagtttctgcaacgaaacaaatcaaaactcatggtgagccaacaacattatactttaatggaaatataagacctaaaggttatgacatttttactgttgggattggtgtaaacggagatcctggtgcaactcctcttgaagctgagaaatttatgcaatcaatatcaagtaaaacagaaaattatactaatgttgatgatacaaataaaatttatgatgagctaaataaatactttaaaacaattgttgaggaaaaacattctattgttgatggaaatgtgactgatcctatgggagagatgattgaattccaattaaaaaatggtcaaagttttacacatgatgattacgttttggttggaaatgatggcagtcaattaaaaaatggtgtggctcttggtggaccaaacagtgatgggggaattttaaaagatgttacagtgacttatgataagacatctcaaaccatcaaaatcaatcatttgaacttaggaagtggacaaaaagtagttcttacctatgatgtacgtttaaaagataactatataagtaacaaattttacaatacaaataatcgtacaacgctaagtccgaagagtgaaaaagaaccaaatactattcgtgatttcccaattcccaaaattcgtgatgttcgtgagtttccggtactaaccatcagtaatcagaagaaaatgggtgaggttgaatttattaaagttaataaagacaaacattcagaatcgcttttgggagctaagtttcaacttcagatagaaaaagatttttctgggtataagcaatttgttccagagggaagtgatgttacaacaaagaatgatggtaaaatttattttaaagcacttcaagatggtaactataaattatatgaaatttcaagtccagatggctatatagaggttaaaacgaaacctgttgtgacatttacaattcaaaatggagaagttacgaacctgaaagcagatccaaatgctaataaaaatcaaatcgggtatcttgaaggaaatggtaaacatcttattaccaacactcccaaacgcccaccaggtgtttttcctaaaacagggggaattggtacaattgtctatatattagttggttctacttttatgatacttaccatttgttctttccgtcgtaaacaattgtaaggtgtcgttgaaattattaaataatagaaaatgactagttttggcctttccctattgtcagtcagattagttattatcaagcttctcatgccaatattaatgcctttaaaagaacagttacaaccattgaccgtacggagattcaacgacggttaggtctggctaaagcctacaatgctagtatttctggaacaagtagtcagtcgactcaatctgtgctgagagattcttattctgaggagcaaaaaaggcagggtggactgaatacgctaggatgttagaagtcagagagcaggttgaccatgtgatgattccaaaaatcaatcaggatttaccaatctacgctggttcagaagaggacaatctgcaacggggagttggtcatctagaagggataagtttgccgattggaggggcttctacacatgcggtcttgagcggtcaaagaggtatgccagctgctcggttgtttgcggatttggataagatgaaaaaaggtgattatttttatgttaccaatctgaaagaaaccttggcttatcaagtggatcgtatcatggtgattgaacctagccaattggatgccgtgagcattgaagaggataaagattatgttacccttctgacctgtacaccttatatgggctctttgtcaactgtaatgggtgacttatcattaacaacgagagagaatcagcttggttctctctctttttggatgttcaaagcgatgagaattttgcttttaaaatttttaaagttgcgaaagccaaaggcttgtcgcttgatgtctttgataagcttgttggtcgcttctaatttggcattggaaagggatagctgagggcgtttgtgatgtaagttttgtacttcatgaaggtcctaaagaccattttaaaagcagaattgccagttgttacgttatcatctatgaagctaaagaattcagttgttcgcttttcttagaaatgaaagagtatgagctgataaaggtcgttataatagcggagctcatctgagaaaacttttatacctcaaagtcagtctagctttgatatcatgaagccattaggagttattccttatcttttagtggcgcgcgatccatatagtgatagatcgagatatttagatccaaaagttctatcatcctcttttggcgccttttttccagcagataatattaaggtagcttggtctaacaactccagcactttatttacaccacctattaatgcaaactacaccactcagattcaagctattgggacaacgattaagtcacaaattccggaatcgattttgacggttacggataaaaagagcaggaagttcagcattaacaagattgacgaagctaaagaaggcttagtaggtgcgaccttcaccttgtctaaacgcacaacagtagcggcagatcatcaagtacaaggagatttcattcctgtcagcaaagagacgacagtcggtcggacaacccttacctttgacaaccttaaacctggattttatgaccttaaagaaacgaaagcgccgaatgcttacgtacttgatcctaagacttatgttgtggtcgttcaaaattcaggaaaaacgacaattgtggatgaagctaacttcaaagaggctgattacccaatggctgataataccagccatgtggagtgcgtagcgttgctacaacgaagcaaagggtaaaaatcctttattttaagcactttttcaagcattttgtctttattgaaaagagtgattttaacataaaaaaggtattaaaaaacatattgacgtgaccgtttgttttgaagtggcttgcgtagacaaaaaaatagatacgtcagataaatttctggcattacgagaacatttttagagtgttctctttttttagtttacggaggaaaaatatatatggaaaaacaggattcacgagttctcatccattgggaggggaattctggggacaagctcattgaacaccaaaccagcgcaacggggtggtactaccaagtcgatcgtagctttagtcaaccaaaaggggaaccgcccagaatgatccaaaggcactagaaagtgtccgtaatgattcgatttcgggcggtgatgatgtcatgggttatgcttatagcaaatgtacttggggagttgcggcacgaattaatcagtgggactgaaactcaaaggttgaaatggtgagaagattaccattaccagttcaatgggaaatggtcaggattgggttggaacagccgaaagactagatggtgaaactgatacagttccaaaagaaggtactattctctctttttaggaaagtagttatggttcgtatataggctacggaactatatctttcgtcacattacatctacagatagtaccatgaattttgcttatatgaccaagtaaagtgaggatatactaacaaatgaaatatttattatcgtatttgtccattttatcgaaaagtttgcatattatcattatgtttgataagatgcaaatataatgatagtaggagctaaatatggatatttaaaaaatcaagagtatcctaagtgctttccattttgaaattcaaatatagctaatagttctagaacttctaattgtttttcgtcgacgatatgaattttcaatcttaactgttaggattccacctccctttggttaaagaaaaaaggtcaggtcgtttagataactttgtcaaacaagctcaagctatctaaaaatagtttgaaatgggcattactctagtttttaataagctatctgatgagcagaaggagaagttaatgcatgttgggaagtcttattttgactatcaagaaaatgctcttatcccacaattaggttttctatattctaaattaactaaaaaaattgaacttgataatcggttgtctccgactgaaaaaaagttattgattaccttattattacatactaaaggtttaatcattgatatgtaagaagtaagtcagctaaccgatctttctattctaaaacttatattgttgctttagaaattttaaagagcgtggatggcttcataataaacagaaatcttaccaatttgcgaagccaaaaaatatgatatttgaagagtccaaagatctaatagatagtccagttagagaagcgttgattataagtgataaggattttcaaaaattaaaacaagagctattattttaaccgacttattttaaagacttatcatatctaggcttgcttgatgattcggaaaaatacggagactatactatttcaaggaaaagatacaaaagtttcgaatcaagtcttcaactatacatccttcaaagtcatcggctagagatttggaattatgaaccaatccctttgattactagaaaaataaatagcttggagaggctaacgtgacactggttgatccaatctcgctttatttaacactaagaatgatgaagaccctcgtattgaagaagaagttgagcagctagaagataagat

SEQ ID NO: 475 - DNA, 12775 bp, Streptococcus agalactiae
cgaccattccccataaaagggccaaccaaaacttcacctgtgaccgttttttgatgtcaacaccagtattttggatgtaccccttaacatgccctttggtatctgcaacagagataatatgaccaaaggaagaatcaccgatgactttaaccgtaatcttgctatcgcctttttgattagccgctaatatttgattagcaatcagggtgcgaccaagagcaactgttgaagacgacaaggtatgatgtttttcctgagccaatttaacagtctcggtgctatcgaggacataagacctgaaggcaccagaggcagaaattgatttaataattttatccataacctatgttatagcacaaagagagagtttgtatggactggattagctgaaaattttagactaaaaagtagtgccagtggattttgaaaggtaacaaaagagtcttccgtttaaacgagaaggctctttttagtcgtttcagatgaaggcaaaaggacgatgaaataattccgtaccttcatggattgctatgttactggcatgaggtctcacgatatttagtaagatattcgtttgaagatattcccacgtattttttaaaggttttaagaaaatgtgtggtgtcgtaaaaatgtaataatttcgctacttccccaatcggtacccctctttgcagtagtaattgtccctccttaatttttgcctttagaatataactttgcaaggaaatgtcagagtattttttaaaaactgagcgtaagtgggaatctgagatatataggtagttggcaatatcagatactttgagtttggagtagaggtggttgtccacataatggagaatactattgtacatttgctgcttgtcagagatgctcttattggttaaggattctgaaaaatcaataagagctgcacagcgaattcttgaaacatcaataagatcaggagcctcttcgtttaaagccatatagtgctttaccagcgcataacttttagccacatcagtattttcctcgaaacttaattctagtaattttgttaagtaaacaacagttaagttcttttcagctcttagggcagggattgaagatgaggtaacactggatgatgggaggcgattaatttcttgctttaacagttgagtgttacccagcttaacgagatcaataatgtgattgagatggtttaaaacagtgggtaactgaaaagagtttttcttagtatgttttaggtgaagaacaatatcaggatccgcaacaatctgttctgactcttctaataaatgattgatgacttgttggcaactagcctcaaactgtgtttggaaaaaggcatcgatagacacaagaagactacgtatactggtagtaggaaaacaagggacaagctttatataggataagatttcttttttactacgatgagaaaattgttctagaaagcgactggataactgttcttgcctattgatatcagggctatagggataaaatggtccaatagcaataagatattgacagacaggaaaaattaagaatgattcttcaaaaagaccctcataaacagtgatatcttggttataagggatagctaaatgttttaaaaactgatagtaaggcaacagatagtcttcgttaccatataactgaacgagttccttgtctcgtgacatgactgaaataggtagttgagatatggtatgcaatgtttgaacatgtttaaaatcgaatgtaaccatttgatagaccgccttcattatcatttctagaatttttctttaggtttgtaaagactacaaaataaaatgatgaaaacaactatcttgtggatacactaaaaagacacgctaattagcaaactctctcttcatcatctctcaccattattatactactatttatatgacaaataaaggtgattttgttaaaatataactttgaaaatccacatatatttttaatcttccgtctgaaaaaataaataaaaatagtaaaaataaacacgaatttaaaataagcaaattttttaagaaaatctgtgctaaactttaatagttttgtgcttaataataatcagcacttacaaagaacaaagggaaaagcgaggagagaacttttaatgaaattatcgaagaagttattgttttcggctgctgttttaacaatggtggcggggtcaactgttgaaccagtagctcagtttgcgactggaatgagtattgtaagagctgcagaagtgtcacaagaacgcccagcgaaaacaacagtaaatatctataaattacaagctgatagttataaatcggaaattacttctaatggtggtatcgagaataaagacggcgaagtaatatctaactatgctaaacttggtgacaatgtaaaaggtttgcaaggtgtacagtttaaacgttataaagtcaagacggatatttctgttgatgaattgaaaaaattgacaacagttgaagcagcagatgcaaaagttggaacgattcttgaagaaggtgtcagtctacctcaaaaaactaatgctcaaggtttggtcgtcgatgctctggattcaaaaagtaatgtgagatacttgtatgtagaagatttaaagaattcaccttcaaacattaccaaagcttatgctgtaccgtttgtgttggaattaccagttgctaactctacaggtacaggtttcctttctgaaattaatatttaccctaaaaacgttgtaactgatgaaccaaaaacagataaagatgttaaataattaggtcaggacgatgcaggttatacgattggtgaagaattcaaatggttcttgaaatctacaatccctgccaatttaggtgactatgaaaaatttgaaattactgataaatttgcagatggcttgacttataaatctgttggaaaaatcaagattggttcgaaaacactgaatagagatgagcactacactattgatgaaccaacagttgataaccaaaatacattaaaaattacgtttaaaccagagaaatttaaagaaattgctgagctacttaaaggaatgacccttgttaaaaatcaagatgctcttgataaagctactgcaaatacagatgatgcggcatttttggaaattccagttgcatcaactattaatgaaaaagcagttttaggaaaagcaattgaaaatacttttgaacttcaatatgaccatactcctgataaagctgacaatccaaaaccatctaatcctccaagaaaaccagaagttcatactggtgggaaacgatttgtaaagaaagactcaacagaaacacaaacactaggtggtgctgagtttgatttgttggcttctgatgggacagcagtaaaatggacagatgctcttattaaagcgaatactaataaaaactatattgctggagaagctgttactgggcaaccaatcaaattgaaatcacatacagacggtacgtttgagattaaaggtttggcttatgcagttgatgcgaatgcagagggtacagcagtaacttacaaattaaaagaaacaaaagcaccagaaggttatgtaatccctgataaagaaatcgagtttacagtatcacaaacatcttataatacaaaaccaactgacatcacggttgatagtgctgatgcaacacctgatacaattaaaaacaacaaacgtccttcaatccctaatactggtggtattggtacggctatctttgtcgctatcggtgctgcggtgatggcttttgctgttaaggggatgaagcgtcgtacaaaagataactaaataaaaggctacttcttaagtaaccatgtttaagaaaagagaaatagccttatttctctttttgtcgtttttaaaataaaggaacatcatgaaacaaacattaaaacttatgttttcttttctgttgatgttagggactatgtttggaattagccaaactgttttagcgcaagaaactcatcagttgacgattgttcatcttgaagcaagggatattgatcgtccaaatccacagttggagattgcccctaaagaagggactccaattgaaggagtactctatcagttgtaccaattaaaatcaactgaagatggcgatttgttggcacattggaattccctaactatcacagaattgaaaaaacaggcgcagcaggtttttgaagccactactaatcaacaaggaaaggctacatttaaccaactaccagatggaatttattatggtctggcggttaaagccggtgaaaaaaatcgtaatgtctcagctttcttggttgacttgtctgaggataaagtgatttatcctaaaatcatctggtccacaggtgagttggacttgcttaaagttggtgtggatggtgataccaaaaaaccactagcaggcgttgtctttgaactttatgaaaagaatggtaggactcctattcgtgtgaaaaatggggtgcattctcaagatattgacgctgcaaaacatttagaaacagattcatcagggcatatcagaatttccgggctcatccatggggactatgtcttaaaagaaatcgagacacagtcaggatatcagatcggacaggcagagactgctgtgactattgaaaaatcaaaaacagtaacagtaacgattgaaaataaaaaagttccgacacctaaagtgccatctcgaggaggtcttattcccaaaacaggtgagcaacaggcaatggcacttgtaattattggtggtattttaattgctttagccttacgattactatcaaaacatcggaaacatcaaaataaggattagcatgggacaaaaatcaaaaatatctctagctacgaatattcgtatatggatttttcgtttaattttcttagcgggtttccttgttttggcatttcccatcgttagtcaggtcatgtactttcaagcctctcacgccaatattaatgcttttaaagaagctgttaccaagattgaccgggtggagattaatcggcgtttagaacttgcttatgcttataacgccagtatagcaggtgccaaaactaatggcgaatatccagcgcttaaagacccctactctgctgaacaaaagcaggcaggggtcgttgagtacgcccgcatgcttgaagtcaaagaacaaataggtcatgtgattattccaagaattaatcaggatatccctatttacgctggctctgctgaagaaaatcttcagaggggcgttggacatttagaggggaccagtcttccagtcggtggtgagtcaactcatgccgttctaactgcccatcgagggctaccaacggccaagctatttaccaatttagacaaggtaacagtaggtgaccgtttttacattgaacacatcggcggaaagattgcttatcaggtagaccaaatcaaagttatcgcccctgatcagttagaggatttgtacgtgattcaaggagaagatcacgtcaccctattaacttgcacaccttatatgataaatagtcatcgcctcctcgttcgaggcaagcgaattccttatgtggaaaaaacagtgcagaaagattcaaagaccttcaggcaacaacaatacctaacctatgctatgtgggtagtcgttggacttatcttgctgtcgcttctcatttggtttaaaaagacgaaacagaaaaagcggagaaagaatgaaaaagcggctagtcaaaatagtcacaataattcgaaataataaaatcagaaccctcatttttgtgatgggaagtctgattctcttatttccgattgtgagccaggtaagttactaccttgcttcgcatcaaaatattaatcaatttaagcgggaagtcgctaagattgatactaatacggttgaacgacgcatcgctttagctaatgcttacaatgagacgttatcaaggaatcccttgcttatagacccttttaccagtaagcaaaaagaaggtttgagagagtatgctcgtatgcttgaagttcatgagcaaataggtcatgtggcaatcccaagtattggggttgatattccaatttatgctggaacatccgaaactgtgcttcagaaaggtagtgggcatttggagggaaccagtcttccagtgggaggtttgtcaacccattcagtactaactgcccaccgtggcttgccaacagctaggctatttaccgacttaaataaagttaaaaaaggccagattttctatgtgacgaacatcaaggaaacacttgcctacaaagtcgtgtctatcaaagttgtggatccaacagctttaagtgaggttaagattgtcaatggtaaggattatataaccttgctgacttgcacaccttacatgatcaatagtcatcgtctcttggtaaaaggagagcgtattccttatgattctaccgaggcggaaaagcacaaagaacaaaccgtacaagattatcgtttgtcactagtgttgaagatactactagtattattaattggactcttcatcgtgataatgatgagaagatggatgcaacatcgtcaataacgatgttgtgaatggcttacttacttatcaaataggtgactaatgatgattgtgaataatggttatctagaagggagaaaaatgaaaaagagacaaaaaatatggagagggttatcagttactttactaatcctgtcccaaattccatttggtatattggtacaaggtgaaacccaagataccaatcaagcacttggaaaagtaattgttaaaaaaacgggagacaatgctacaccattaggcaaagcgacttttgtgttaaaaaatgacaatgataagtcagaaacaagtcacgaaacggtagagggttctggagaagcaacctttgaaaacataaaacctggagactacacattaagagaagaaacagcaccaattggttataaaaaaactgataaaacctggaaagttaaagttgcagataacggagcaacaataatcgagggtatggatgcagataaagcagagaaacgaaaagaagttttgaatgcccaatatccaaaatcagctatttatgaggatacaaaagaaaattacccattagttaatgtagagggttccaaagttggtgaacaatacaaagcattgaatccaataaatggaaaagatggtcgaagagagattgctgaaggttggttatcaaaaaaaattacaggggtcaatgatctcgataagaataaatataaaattgaattaactgttgagggtaaaaccactgttgaaacgaaagaacttaatcaaccactagatgtcgttgtgctattagataattcaaatagtatgaataatgaaagagccaataattctcaaagagcattaaaagctggggaagcagttgaaaagctgattgataaaattacatcaaataaagacaatagagtagctcttgtgacatatgcctcaaccatttttgatggtactgaagcgaccgtatcaaagggagttgccgatcaaaatggtaaagcgctgaatgatagtgtatcatgggattatcataaaactacttttacagcaactacacataattacagttatttaaatttaacaaatgatgctaacgaagttaatattctaaagtcaagaattccaaaggaagcggagcatataaatggggatcgcacgctctatcaatttggtgcgacatttactcaaaaagctctaatgaaagcaaatgaaattttagagacacaaagttctaatgctagaaaaaaacttatttttcacgtaactgatggtgtccctacgatgtcttatgccataaattttaatccttatatatcaacatcttaccaaaaccagtttaattcttttttaaataaaataccagatagaagtggtattctccaagaggattttataatcaatggtgatgattatcaaatagtaaaaggagatggagagagttttaaactgttttcggatagaaaagttcctgttactggaggaacgacacaagcagcttatcgagtaccgcaaaatcaactctctgtaatgagtaatgagggatatgcaattaatagtggatatatttatctctattggagagattacaactgggtctatccatttgatcctaagacaaagaaagtttctgcaacgaaacaaatcaaaactcatggtgagccaacaacattatactttaatggaaatataagacctaaaggttatgacatttttactgttgggattggtgtaaacggagatcctggtgcaactcctcttgaagctgagaaatttatgcaatcaatatcaagtaaaacagaaaattatactaatgttgatgatacaaataaaatttatgatgagctaaataaatactttaaaacaattgttgaggaaaaacattctattgttgatggaaatgtgactgatcctatgggagagatgattgaattccaattaaaaaatggtcaaagttttacacatgatgattacgttttggttggaaatgatggcagtcaattaaaaaatggtgtggctcttggtggaccaaacagtgatgggggaattttaaaagatgttacagtgacttatgataagacatctcaaaccatcaaaatcaatcatttgaacttaggaagtggacaaaaagtagttcttacctatgatgtacgtttaaaagataactatataagtaacaaattttacaatacaaataatcgtacaacgctaagtccgaagagtgaaaaagaaccaaatactattcgtgatttcccaattcccaaaattcgtgatgttcgtgagtttccggtactaaccatcagtaatcagaagaaaatgggtgaggttgaatttattaaagttaataaagacaaacattcagaatcgcttttgggagctaagtttcaacttcagatagaaaaagatttttctgggtataagcaatttgttccagagggaagtgatgttacaacaaagaatgatggtaaaatttattttaaagcacttcaagatggtaactataaattatatgaaatttcaagtccagatggctatatagaggttaaaacgaaacctgttgtgacatttacaattcaaaatggagaagttacgaacctgaaagcagatccaaatgctaataaaaatcaaatcgggtatcttgaaggaaatggtaaacatcttattaccaacactcccaaacgcccaccaggtgtttttcctaaaacagggggaattggtacaattgtctatatattagttggttctacttttatgatacttaccatttgttctttccgtcgtaaacaattgtaaggtgtcgttgaaattattaaataatagaaaatgactagttttggcctttccctattgtcagtcagattagttattatcaagcttctcatgccaatattaatgcctttaaaagaacagttacaaccattgaccgtacggagattcaacgacggttaggtctggctaaagcctacaatgctagtatttctggaacaagtagtcagtcgactcaatctgtgctgagagattcttattctgaggagcaaaaaaggcagggtggactgaatacgctaggatgttagaagtcagagagcaggttgaccatgtgatgattccaaaaatcaatcaggatttaccaatctacgctggttcagaagaggacaatctgcaacggggagttggtcatctagaagggataagtttgccgattggaggggcttctacacatgcggtcttgagcggtcaaagaggtatgccagctgctcggttgtttgcggatttggataagatgaaaaaaggtgattatttttatgttaccaatctgaaagaaaccttggcttatcaagtggatcgtatcatggtgattgaacctagccaattggatgccgtgagcattgaagaggataaagattatgttacccttctgacctgtacaccttatatgggctctttgtcaactgtaatgggtgacttatcattaacaacgagagagaatcagcttggttctctctctttttggatgttcaaagcgatgagaattttgcttttaaaatttttaaagttgcgaaagccaaaggcttgtcgcttgatgtctttgataagcttgttggtcgcttctaatttggcattggaaagggatagctgagggcgtttgtgatgtaagttttgtacttcatgaaggtcctaaagaccattttaaaagcagaattgccagttgttacgttatcatctatgaagctaaagaattcagttgttcgcttttcttagaaatgaaagagtatgagctgataaaggtcgttataatagcggagctcatctgagaaaacttttatacctcaaagtcagtctagctttgatatcatgaagccattaggagttattccttatcttttagtggcgcgcgatccatatagtgatagatcgagatatttagatccaaaagttctatcatcctcttttggcgccttttttccagcagataatattaaggtagcttggtctaacaactccagcactttatttacaccacctattaatgcaaactacaccactcagattcaagctattgggacaacgattaagtcacaaattccggaatcgattttgacggttacggataaaaagagcaggaagttcagcattaacaagattgacgaagctaaagaaggcttagtaggtgcgaccttcaccttgtctaaacgcacaacagtagcggcagatcatcaagtacaaggagatttcattcctgtcagcaaagagacgacagtcggtcggacaacccttacctttgacaaccttaaacctggattttatgaccttaaagaaacgaaagcgccgaatgcttacgtacttgatcctaagacttatgttgtggtcgttcaaaattcaggaaaaacgacaattgtggatgaagctaacttcaaagaggctgattacccaatggctgataataccagccatgtggagtgcgtagcgttgctacaacgaagcaaagggtaaaaatcctttattttaagcactttttcaagcattttgtctttattgaaaagagtgattttaacataaaaaaggtattaaaaaacatattgacgtgaccgtttgttttgaagtggcttgcgtagacaaaaaaatagatacgtcagataaatttctggcattacgagaacatttttagagtgttctctttttttagtttacggaggaaaaatatatatggaaaaacaggattcacgagttctcatccattgggaggggaattctggggacaagctcattgaacaccaaaccagcgcaacggggtggtactaccaagtcgatcgtagctttagtcaaccaaaaggggaaccgcccagaatgatccaaaggcactagaaagtgtccgtaatgattcgatttcgggcggtgatgatgtcatgggttatgcttatagcaaatgtacttggggagttgcggcacgaattaatcagtgggactgaaactcaaaggttgaaatggtgagaagattaccattaccagttcaatgggaaatggtcaggattgggttggaacagccgaaagactagatggtgaaactgatacagttccaaaagaaggtactattctctctttttaggaaagtagttatggttcgtatataggctacggaactatatctttcgtcacattacatctacagatagtaccatgaattttgcttatatgaccaagtaaagtgaggatatactaacaaatgaaatatttattatcgtatttgtccattttatcgaaaagtttgcatattatcattatgtttgataagatgcaaatataatgatagtaggagctaaatatggatatttaaaaaatcaagagtatcctaagtgctttccattttgaaattcaaatatagctaatagttctagaacttctaattgtttttcgtcgacgatatgaattttcaatcttaactgttaggattccacctccctttggttaaagaaaaaaggtcaggtcgtttagataactttgtcaaacaagctcaagctatctaaaaatagtttgaaatgggcattactctagtttttaataagctatctgatgagcagaaggagaagttaatgcatgttgggaagtcttattttgactatcaagaaaatgctcttatcccacaattaggttttctatattctaaattaactaaaaaaattgaacttgataatcggttgtctccgactgaacaaaagttattgattaccttattattacatactaaaggtttaatcattgatatgtaagaagtaagtcagctaaccgatctttctattctaaaacttatattgttgctttagaaattttaaagagcgtggatggcttcataataaacagaaatcttaccaatttgcgaagccaaaaaatatgatatttgaagagtccaaagatctaatagatagtccagttagagaagcgttgattataagtgataaggattttcaaaaattaaaacaagagctattattttaaccgacttattttaaagacttatcatatctaggcttgcttgatgattcggaaaaatacggagactatactatttcaaggaaaagatacaaaagtttcgaatcaagtcttcaactatacatccttcaaagtcatcggctagagatttggaattatgaaccaatccctttgattactagaaaaataaatagcttggagaggctaacgtgacactggttgatccaatctcgctttatttaacactaagaatgatgaagaccctcgtattgaagaagaagttgagcagctagaagataagat

SEQ ID NO: 476 - DNA, 13006 bp, Streptococcus agalactiae
taacacggattggaaataacatcaatcaaattgcgcgtgctatcaaccaaagccatctaatttctcaggctcagtatcactttcatcgagaagcacgttaagcccaacagcagggggggttgctctgattcggttaagtaataagcaaaatcctcaccaattttcccagtaataagaggcgttgttgaggtatagggattacctgtgccatagtcgatgatggtcacaaaatgaccattccccataaaagggccaaccaaaacttcacctgtggccgttttttgatgtcaacaccagtattttggatgtaccccttaacatgccctttggtatctgcaacagagataatatgaccaaaggaagaatcaccgatgactttaaccgtaatcttgctatcgcctttttgattagccgctaatatttgattagcaatcagggtgcgaccaagagcaactgttgaagacgacaaggtatgatgtttttcctgagccaatttaacagtctcggtgctatcgaggacataagacctgaaggcaccagaggcagaaattgatttaataattttatccataacctatgttatagcacaaagagagagtttgtatggactggattagctgaaaattttagactaaaaagtagtgccagtggattttgaaaggtaacaaaagagtcttccgtttaaacgagaaggctgtttttagtcgtttcagatgaaggcaaaaggacgatgaaataattccgtaccttcatggattgctatgttactggcatgaggtctcacgatatttagtaagatattcgtttgaagatattcccacgtattttttaaaggttttaagaaaatgtgtggtgtcgtaaaaatgtaataatttcgctacttccccaatcggtacccctctttgcagtagtaattgtccctccttaatttttgcctttagaatataactttgcaaggaaatgtcagagtattttttaaaaactgagcgtaagtgggaatctgagatatataggtagttggcaatatcagatactttgagtttggagtagaggtggttgtccacataatggagaatactattgtacatttgctgcttgtcagagatgctcttattggttaaggattctgaaaaatcaataagagctgcacagcgaattcttgaaacatcaataagatcaggagcctcttcgtttaaagccatatagtgctttaccagcgcataacttttagccacatcagtattttcctcgaaacttaattctagtaattttgttaagtaaacaacagttaagttcttttcagctcttagggcagggattgaagatgaggtaacactggatgatgggaggcgattaatttcttgctttaacagttgagtgttacccagcttaacgagatcaataatgtgattgagatggtttaaaacagtgggtaactgaaaagagtttttcttagtatgttttaggtgaagaacaatatcaggatccgcaacaatctgttctgactcttctaataaatgattgatgacttgttggcaactagcctcaaactgtgtttggaaaaaggcatcgatagacacaagaagactacgtatactggtagtaggaaaacaagggacaagctttatataggataagatttcttttttactacgatgagaaaattgttctagaaagcgactggataactgttcttgcctattgatatcagggctatagggataaaatggtccaatagcaataagatattgacagacaggaaaaattaagaatgattcttcaaaaagaccctcataaacagtgatatcttggttataagggatagctaaatgttttaaaaactgatagtaaggcaacagatagtcttcgttactatataactgaacgagttccttgtctcgtgacatgactgaaataggtagttgagatatggtatgcaatgtttgaacatgtttaaaatcgaatgtaaccatttgatagaccgccttcattatcatttctagaatttttctttaggtttgtaaagactacaaaataaaatgatgaaaacaactatcttgtggatacactaaaaagacacgctaattagcaaactctctcttcatcatctctcaccattattatactactatttatatgacaaataaaggttattttgttaaaatataactttgaaaatccacatatatttttaatcttccgtctgaaaaaataaataaaaatagtaaaaataaacacgaatttaaaataagcaaattttttaagaaaatctgtgctaaactttaatagttttgtgcttaataataatcagcacttacaaagaacaaagggaaaagcgaggagagaacttttaatgaaattatcgaagaagttattgttttcggctgctgttttaacaatggtggcggggtcaactgttgaaccagtagctcagtttgcgactggaatgagtattgtaagagctgcagaagtgtcacaagaacgcccagcgaaaacaacagtaaatatctataaattacaagctgatagttataaatcggaaattacttctaatggtggtatcgagaataaagacggcgaagtaatatctaactatgctaaacttggtgacaatgtaaaaggtttgcaaggtgtacagtttaaacgttataaagtcaagacggatatttctgttgatgaattgaaaaaattgacaacagttgaagcagcagatgcaaaagttggaacgattcttgaagaaggtgtcagtctacctcaaaaaactaatgctcaaggtttggtcgtcgatgctctggattcaaaaagtaatgtgagatacttgtatgtagaagatttaaagaattcaccttcaaacattaccaaagcttatgctgtaccgtttgtgttggaattaccagttgctaactctacaggtacaggtttcctttctgaaattaatatttaccctaaaaacgttgtaactgatgaaccaaaaacagataaagatgttaaaaaattaggtcaggacgatgcaggttatacgattggtgaagaattcaaatggttcttgaaatctacaatccctgccaatttaggtgactatgaaaaatttgaaattactgataaatttgcagatggcttgacttataaatctgttggaaaaatcaagattggttcgaaaacactgaatagagatgagcactacactattgatgaaccaacagttgataaccaaaatacattaaaaattacgtttaaaccagagaaatttaaagaaattgctgagctacttaaaggaatgacccttgttaaaaatcaagatgctcttgataaagctactgcaaatacagatgatgcggcatttttggaaattccagttgcatcaactattaatgaaaaagcagttttaggaaaagcaattgaaaatacttttgaacttcaatatgaccatactcctgataaagctgacaatccaaaaccatctaatcctccaagaaaaccagaagttcatactggtgggaaacgatttgtaaagaaagactcaacagaaacacaaacactaggtggtgctgagtttgatttgttggcttctgatgggacagcagtaaaatggacagatgctcttattaaagcgaatactaataaaaactatattgctggagaagctgttactgggcaaccaatcaaattgaaatcacatacagacggtacgtttgagattaaaggtttggcttatgcagttgatgcgaatgcagagggtacagcagtaacttacaaattaaaagaaacaaaagcaccagaaggttatgtaatccctgataaagaaatcgagtttacagtatcacaaacatcttataatacaaaaccaactgacatcacggttgatagtgctgatgcaacacctgatacaattaaaaacaacaaacgtccttcaatccctaatactggtggtattggtacggctatctttgtcgctatcggtgctgcggtgatggcttttgctgttaaggggatgaagcgtcgtacaaaagataactaaataaaaggctacttcttaagtaaccatgtttaagaaaagagaaatagccttatttctctttttgtcgtttttaaaataaaggaacatcatgaaacaaacattaaaacttatgttttcttttctgttgatgttagggactatgtttggaattagccaaactgttttagcgcaagaaactcatcagttgacgattgttcatcttgaagcaagggatattgatcgtccaaatccacagttggagattgcccctaaagaagggactccaattgaaggagtactctatcagttgtaccaattaaaatcaactgaagatggcgatttgttggcacattggaattccctaactatcacagaattgaaaaaacaggcgcagcaggtttttgaagccactactaatcaacaaggaaaggctacatttaaccaactaccagatggaatttattatggtctggcggttaaagccggtgaaaaaaatcgtaatgtctcagctttcttggttgacttgtctgaggataaagtgatttatcctaaaatcatctggtccacaggtgagttggacttgcttaaagttggtgtggatggtgataccaaaaaaccactagcaggcgttgtctttgaactttatgaaaagaatggtaggactcctattcgtgtgaaaaatggggtgcattctcaagatattgacgctgcaaaacatttagaaacagattcatcagggcatatcagaatttccgggctcatccatggggactatgtcttaaaagaaatcgagacacagtcaggatatcagatcggacaggcagagactgctgtgactattgaaaaatcaaaaacagtaacagtaacgattgaaaataaaaaagttccgacacctaaagtgccatctcgaggaggtcttattcccaaaacaggtgagcaacaggcaatggcacttgtaattattggtggtattttaattgctttagccttacgattactatcaaaacatcggaaacatcaaaataaggattagcatgggacaaaaatcaaaaatatctctagctacgaatattcgtatatggatttttcgtttaattttcttagcgggtttccttgttttggcatttcccatcgttagtcaggtcatgtactttcaagcctctcacgccaatattaatgcttttaaagaagctgttaccaagattgaccgggtggagattaatcggcgtttagaacttgcttatgcttataacgccagtatagcaggtgccaaaactaatggcgaatatccagcgcttaaagacccctactctgctgaacaaaagcaggcaggggtcgttgagtacgcccgcatgcttgaagtcaaagaacaaataggtcatgtgattattccaagaattaatcaggatatccctatttacgctggctctgctgaagaaaatcttcagaggggcgttggacatttagaggggaccagtcttccagtcggtggtgagtcaactcatgccgttctaactgcccatcgagggctaccaacggccaagctatttaccaatttagacaaggtaacagtaggtgaccgtttttacattgaacacatcggcggaaagattgcttatcaggtagaccaaatcaaagttatcgcccctgatcagttagaggatttgtacgtgattcaaggagaagatcacgtcaccctattaacttgcacaccttatatgataaatagtcatcgcctcctcgttcgaggcaagcgaattccttatgtggaaaaaacagtgcagaaagattcaaagaccttcaggcaacaacaatacctaacctatgctatgtgggtagtcgttggacttatcttgctgtcgcttctcatttggtttaaaaagacgaaacagaaaaagcggagaaagaatgaaaaagcggctagtcaaaatagtcacaataattcgaaataataaaatcagaaccctcatttttgtgatgggaagtctgattctcttatttccgattgtgagccaggtaagttactaccttgcttcgcatcaaaatattaatcaatttaagcgggaagtcgctaagattgatactaatacggttgaacgacgcatcgctttagctaatgcttacaatgagacgttatcaaggaatcccttgcttatagacccttttaccagtaagcaaaaagaaggtttgagagagtatgctcgtatgcttgaagttcatgagcaaataggtcatgtggcaatcccaagtattggggttgatattccaatttatgctggaacatccgaaactgtgcttcagaaaggtagtgggcatttggagggaaccagtcttccagtgggaggtttgtcaacccattcagtactaactgcccaccgtggcttgccaacagctaggctatttaccgacttaaataaagttaaaaaaggccagattttctatgtgacgaacatcaaggaaacacttgcctacaaagtcgtgtctatcaaagttgtggatccaacagctttaagtgaggttaagattgtcaatggtaaggattatataaccttgctgacttgcacaccttacatgatcaatagtcatcgtctcttggtaaaaggagagcgtattccttatgattctaccgaggcggaaaagcacaaagaacaaaccgtacaagattatcgtttgtcactagtgttgaagatactactagtattattaattggactcttcatcgtgataatgatgagaagatggatgcaacatcgtcaataacgatgttgtgaatggcttacttacttatcaaataggtgactaatgatgattgtgaataatggttatctagaagggagaaaaatgaaaaagagacaaaaaatatggagagggttatcagttactttactaatcctgtcccaaattccatttggtatattggtacaaggtgaaacccaagataccaatcaagcacttggaaaagtaattgttaaaaaaacgggagacaatgctacaccattaggcaaagcgacttttgtgttaaaaaatgacaatgataagtcagaaacaagtcacgaaacggtagagggttctggagaagcaacctttgaaaacataaaacctggagactacacattaagagaagaaacagcaccaattggttataaaaaaactgataaaacctggaaagttaaagttgcagataacggagcaacaataatcgagggtatggatgcagataaagcagagaaacgaaaagaagttttgaatgcccaatatccaaaatcagctatttatgaggatacaaaagaaaattacccattagttaatgtagagggttccaaagttggtgaacaatacaaagcattgaatccaataaatggaaaagatggtcgaagagagattgctgaaggttggttatcaaaaaaaaatacaggggtcaatgatctcgataagaataaatataaaattgaattaactgttgagggtaaaaccactgttgaaacgaaagaacttaatcaaccactagatgtcgttgtgctattagataattcaaatagtatgaataatgaaagagccaataattctcaaagagcattaaaagctggggaagcagttgaaaagctgattgataaaattacatcaaataaagacaatagagtagctcttgtgacatatgcctcaaccatttttgatggtactgaagcgaccgtatcaaagggagttgccgatcaaaatggtaaagcgctgaatgatagtgtatcatgggattatcataaaactacttttacagcaactacacataattacagttatttaaatttaacaaatgatgctaacgaagttaatattctaaagtcaagaattccaaaggaagcggagcatataaatggggatcgcacgctctatcaatttggtgcgacatttactcaaaaagctctaatgaaagcaaatgaaattttagagacacaaagttctaatgctagaaaaaaacttatttttcacgtaactgatggtgtccctacgatgtcttatgccataaattttaatccttatatatcaacatcttaccaaaaccagtttaattcttttttaaataaaataccagatagaagtggtattctccaagaggattttataatcaatggtgatgattatcaaatagtaaaaggagatggagagagttttaaactgttttcggatagaaaagttcctgttactggaggaacgacacaagcagcttatcgagtaccgcaaaatcaactctctgtaatgagtaatgagggatatgcaattaatagtggatatatttatctctattggagagattacaactgggtctatccatttgatcctaagacaaagaaagtttctgcaacgaaacaaatcaaaactcatggtgagccaacaacattatactttaatggaaatataagacctaaaggttatgacatttttactgttgggattggtgtaaacggagatcctggtgcaactcctcttgaagctgagaaatttatgcaatcaatatcaagtaaaacagaaaattatactaatgttgatgatacaaataaaatttatgatgagctaaataaatactttaaaacaattgttgaggaaaaacattctattgttgatggaaatgtgactgatcctatgggagagatgattgaattccaattaaaaaatggtcaaagttttacacatgatgattacgttttggttggaaatgatggcagtcaattaaaaaatggtgtggctcttggtggaccaaacagtgatgggggaattttaaaagatgttacagtgacttatgataagacatctcaaaccatcaaaatcaatcatttgaacttaggaagtggacaaaaagtagttcttacctatgatgtacgtttaaaagataactatataagtaacaaattttacaatacaaataatcgtacaacgctaagtccgaagagtgaaaaagaaccaaatactattcgtgatttcccaattcccaaaattcgtgatgttcgtgagtttccggtactaaccatcagtaatcagaagaaaatgggtgaggttgaatttattaaagttaataaagacaaacattcagaatcgcttttgggagctaagtttcaacttcagatagaaaaagatttttctgggtataagcaatttgttccagagggaagtgatgttacaacaaagaatgatggtaaaatttattttaaagcacttcaagatggtaactataaattatatgaaatttcaagtccagatggctatatagaggttaaaacgaaacctgttgtgacatttacaattcaaaatggagaagttacgaacctgaaagcagatccaaatgctaataaaaatcaaatcgggtatcttgaaggaaatggtaaacatcttattaccaacactcccaaacgcccaccaggtgtttttcctaaaacagggggaattggtacaattgtctatatattagttggttctacttttatgatacttaccatttgttctttccgtcgtaaacaattgtaaggtgtcgttgaaattattaaataatagaaaatgactagttttggcctttccctattgtcagtcagattagttattatcaagcttctcatgccaatattaatgcctttaaaagaacagttacaaccattgaccgtacggagattcaacgacggttaggtctggctaaagcctacaatgctagtatttctggaacaagtagtcagtcgactcaatctgtgctgagagattcttattctgaggagcaaaaaaggcagggtggactgaatacgctaggatgttagaagtcagagagcaggttgaccatgtgatgattccaaaaatcaatcaggatttaccaatctacgctggttcagaagaggacaatctgcaacggggagttggtcatctagaagggataagtttgccgattggaggggcttctacacatgcggtcttgagcggtcaaagaggtatgccagctgctcggttgtttgcggatttggataagatgaaaaaaggtgattatttttatgttaccaatctgaaagaaaccttggcttatcaagtggatcgtatcatggtgattgaacctagccaattggatgccgtgagcattgaagaggataaagattatgttacccttctgacctgtacaccttatatgggctctttgtcaactgtaatgggtgacttatcattaacaacgagagagaatcagcttggttctctctctttttggatgttcaaagcgatgagaattttgcttttaaaatttttaaagttgcgaaagccaaaggcttgtcgcttgatgtctttgataagcttgttggtcgcttctaatttggcattggaaagggatagctgagggcgtttgtgatgtaagttttgtacttcatgaaggtcctaaagaccattttaaaagcagaattgccagttgttacgttatcatctatgaagctaaagaattcagttgttcgcttttcttagaaatgaaagagtatgagctgataaaggtcgttataatagcggagctcatctgagaaaacttttatacctcaaagtcagtctagctttgatatcatgaagccattaggagttattccttatcttttagtggcgcgcgatccatatagtgatagatcgagatatttagatccaaaagttctatcatcctcttttggcgccttttttccagcagataatattaaggtagcttggtctaacaactccagcactttatttacaccacctattaatgcaaactacaccactcagattcaagctattgggacaacgattaagtcacaaattccggaatcgattttgacggttacggataaaaagagcaggaagttcagcattaacaagattgacgaagctaaagaaggcttagtaggtgcgaccttcaccttgtctaaacgcacaacagtagcggcagatcatcaagtacaaggagatttcattcctgtcagcaaagagacgacagtcggtcggacaacccttacctttgacaaccttaaacctggattttatgaccttaaagaaacgaaagcgccgaatgcttacgtacttgatcctaagacttatgttgtggtcgttcaaaattcaggaaaaacgacaattgtggatgaagctaacttcaaagaggctgattacccaatggctgataataccagccatgtggagtgcgtagcgttgctacaacgaagcaaagggtaaaaatcctttattttaagcactttttcaagcattttgtctttattgaaaagagtgattttaacataaaaaaggtattaaaaaacatattgacgtgaccgtttgttttgaagtggcttgcgtagacaaaaaaatagatacgtcagataaatttctggcattacgagaacatttttagagtgttctctttttttagtttacggaggaaaaatatatatggaaaaacaggattcacgagttctcatccattgggaggggaattctggggacaagctcattgaacaccaaaccagcgcaatggggtggtactaccaagtcgatcgtagctttagtcaaccaaaaggggaaccgcccagaatgatccaaaggcactagaaagtgtccgtaatgattcgatttcgggcggtgatgatgtcatgggttatgcttatagcaaatgtacttggggagttgcggcacgaattaatcagtgggactgaaactcaaaggttgaaatggtgagaagattaccattaccagttcaatgggaaatggtcaggattgggttggaacagccgaaagactagatggtgaaactgatacagttccaaaagaaggtactattctctctttttaggaaagtagttatggttcgtatataggctacggaactatatctttcgtcacattacatctacagatagtaccatgaattttgcttatatgaccaagtaaagtgaggatatactaacaaatgaaatatttattatcgtatttgtccattttatcgaaaagtttgcatattatcattatgtttgataagatgcaaatataatgatagtaggagctaaatatggatatttaaaaaatcaagagtatcctaagtgctttccattttgaaattcaaatatagctaatagttctagaacttctaattgtttttcgtcgacgatatgaattttcaatcttaactgttaggattccacctccctttggttaaagaaaaaaggtcaggtcgtttagataactttgtcaaacaagctcaagctatctaaaaatagtttgaaatgggcattactctagtttttaataagctatctgatgagcagaaggagaagttaatgcatgttgggaagtcttattttgactatcaagaaaatgctcttatcccacaattaggttttctatattctaaattaactaaaaaaattgaacttgataatcggttgtctccgactgaacaaaagttattgattaccttattattacatactaaaggtttaatcattgatatgtaagaagtaagtcagctaaccgatctttctattctaaaacttatattgttgctttagaaattttaaagagcgtggatggcttcataataaacagaaatcttaccaatttgcgaagccaaaaaatatgatatttgaagagtccaaagatctaatagatagtccagttagagaagcgttgattataagtgataaggattttcaaaaattaaaacaagagctattattttaaccgacttattttaaagacttatcatatctaggcttgcttgatgattcggaaaaatacggagactatactatttcaaggaaaagatacaaaagtttcgaatcaagtcttcaactatacatccttcaaagtcatcggctagagatttggaattatgaaccaatccctttgattactagaaaaataaatagcttggagaggctaacgtgacactggttgatccaatctcgctttatttaacactaagaatgatgaagaccctcgtattgaagaagaagttgagcagctagaagataagat

SEQ ID NO: 477 - DNA, 13000 bp, Streptococcus agalactiae
taacacggattggaaataacatcaatcaaatttcgcgtgctatcaaccaaagccatctaatttctcaggctcagtatcactttcatcgagaagcacgttaagcccaacagcagggggggtgctctgattcggttaagtaataagcaaaatcctcaccaattttcccagtaataagaggcgttgttgaggtatagggattacctgtgccatagtcgatgatggtcacaaaatgaccattccccataaaagggccaaccaaaacttcacctgtggccgttttttgatgtcaacaccagtattttggatgtaccccttaacatgccctttggtatctgcaacagagataatatgaccaaaggaagaatcaccgatgactttaaccgtaatcttgctatcgcctttttgattagccgctaatatttgattagcaatcagggtgcgaccaagagcaactgttgaagacgacaaggtatgatgtttttcctgagccaatttaacagtctcggtgctatcgaggacataagacctgaaggcaccagaggcagaaattgatttaataattttatccataacctatgttatagcacaaagagagagtttgtatggactggattagctgaaaattttagactaaaaagtagtgccagtggattttgaaaggtaacaaaagagtcttccgtttaaacgagaaggctgtttttagtcgtttcagatgaaggcaaaaggacgatgaaataattccgtaccttcatggattgctatgttactggcatgaggtctcacgatatttagtaagatattcgtttgaagatattcccacgtattttttaaaggttttaagaaaatgtgtggtgtcgtaaaaatgtaataatttcgctacttccccaatcggtacccctctttgcagtagtaattgtccctccttaatttttgcctttagaatataactttgcaaggaaatgtcagagtattttttaaaaaccgagcgtaagtgggaatttgagatatataggtagttggcaatatcagatactttgagtttggagtagaggtggttgtccacataatggagaatactattgtacatttgctgcttgtcagagatgctcttattggttaaggattctgaaaaatcaataagagctgcacagcgaattcttgaaacatcaataagatcaggagcctcttcgtttaaagccatatagtgctttaccagcgcataacttttagccacatcagtatttttctcgaaacttaattctagtaattttgttaagtaaacaacagttaagttcttttcagctcttagggcagggattgaagatgaggtaacactggatgatgggaggcgattaatttcttgctttaacagttgagtgttacccagcttaacgagatcaataatgtgattgagatggtttaaaacagtgggtaactgaaaagagtttttcttagtatgttttaggtgaagaacaatatcaggatccgcaacaatctgttctgactcttctaataaatgattgatggcttgttggcaactagcctcaaactgtgtttggaaaaaggcatcgatagacacaagaagactacgtatactggtagtaggaaaacaagggacaagctttatataggataagatttcttttttactacgatgagaaaattgttctagaaagcgactggataactgttcttgcctattgatatcagggctatagggataaaatggtccaatagcaataagatattgacagacaggaaaaattaagaatgattcttcaaaaagaccctcataaacagtgatatcttggttataagggatagctaaatgttttaaaaactgatagtaaggcaacagatagtcttcgttaccatataactgaacgagttccttgtctcgtgacatgactgaaataggtagttgagatatggtatgcaatgtttgaacatgtttaaaatcgaatgtaaccatttgatagaccgccttcattatcatttctagaatttttctttaggtttgtaaagactacaaaataaaatgatgaaaacaactatcttgtggatacactaaaaagacacgctaattagcaaactctctcttcatcatctctcaccattattatactactatttatatgacaaataaaggtgattttgttaaaaatataactttgaaaatccacatatatttttaatcttccgtctgaaaaaataaataaaaatagtaaaaataaacacgaatttaaaataagcaaattttttaagaaaatctgtgctaaactttaatagttttgtgcttaataataatcagcacttacaaagaacaaagggaaaagcgaggagagaacttttaatgaaattatcgaagaagttattgttttcggctgctgttttaacaatagtggcggggtcaactgttgaaccagtagctcagtttgcgactggaatgagtattgtaagagctgcagaagtgtcacaagaacgcccagcgaaaacaacagtaaatatctataaattacaagctgatagttataaatcggaaattacttctaatggtggtatcgagaataaagacggcgaagtaatatctaactatgctaaacttggtgacaatgtaaaaggtttgcaaggtgtacagtttaaacgttataaagtcaagacggatatttctgttgatgaattgaaaaaattgacaacagttgaagcagcagatgcaaaagttggaacgattcttgaagaaggtgtcagtctacctcaaaaaactaatgctcaaggtttggtcgtcgatgctctggattcaaaaagtaatgtgagatacttgtatgtagaagatttaaagaattcaccttcaaacattaccaaagcttatgctgtaccgtttgtgttggaattaccagttgctaactctacaggtacaggtttcctttctgaaattaatatttaccctaaaaacgttgtaactgatgaaccaaaaacagataaagatgttaaaaaattaggtcaggacgatgcaggttatacgattggtgaagaattcaaatggttcttgaaatctacaatccctgccaatttaggtgactatgaaaaatttgaaattactgataaatttgcagatggcttgacttataaatctgttggaaaaatcaagattggttcgaaaacactgaatagagatgagcactacactattgatgaaccaacagttgataaccaaaatacattaaaaattacgtttaaaccagagaaatttaaagaaattgctgagctacttaaaggaatgacccttgttaaaaatcaagatgctcttgataaagctactgcaaatacagatgatgcggcatttttggaaattccagttgcatcaactattaatgaaaaagcagttttaggaaaagcaattgaaaatacttttgaacttcaatatgaccatactcctgataaagctgacaatccaaaaccatctaatcctccaagaaaaccagaagttcatactggtgggaaacgatttgtaaagaaagactcaacagaaacacaaacactaggtggtgctgagtttgatttgttggcttctgatgggacagcagtaaaatggacagatgctcttattaaagcgaatactaataaaaactatattgctggagaagctgttactgggcaaccaatcaaattgaaatcacatacagacggtacgtttgagattaaaggtttggcttatgcagttgatgcgaatgcagagggtacagcagtaacttacaaattaaaagaaacaaaagcaccagaaggttatgtaatccctgataaagaaatcgagtttacagtatcacaaacatcttataatacaaaaccaactgacatcacggttgatagtgctgatgcaacacctgatacaattaaaaacaacaaacgtccttcaatccctaatactggtggtattggtacggctatctttgtcgctatcggtgctgcggtgatggcttttgctgttaaggggatgaagcgtcgtacaaaagataactaaataaaaggctacttcttaagtaaccatgtttaagaaaagagaaatagccttatttctctttttgtcgtttttaaaataaaggaacatcatgaaacaaacattaaaacttatgttttcttttctgttgatgttagggactatgtttggaattagccaaactgttttagcgcaagaaactcatcagttgacgattgttcatcttgaagcaagggatattgatcgtccaaatccacagttggagattgcccctaaagaagggactccaattgaaggagtactctatcagttgtaccaattaaaatcaactgaagatggcgatttgttggcacattggaattccctaactatcacagaattgaaaaaacaggcgcagcaggtttttgaagccactactaatcaacaaggaaaggctacatttaaccaactaccagatggaatttattatggtctggcggttaaagccggtgaaaaaaatcgtaatgtctcagctttcttggttgacttgtctgaggataaagtgatttatcctaaaatcatctggtccacaggtgagttggacttgcttaaagttggtgtggatggtgataccaaaaaaccactagcaggcgttgtctttgaactttatgaaaagaatggtaggactcctattcgtgtgaaaaatggggtgcattctcaagatattgacgctgcaaaacatttagaaacagattcatcagggcatatcagaatttccgggctcatccatggggactatgtcttaaaagaaatcgagacacagtcaggatatcagatcggacaggcagagactgctgtgactattgaaaaatcaaaaacagtaacagtaacgattgaaaataaaaaagttccgacacctaaagtgccatctcgaggaggtcttattcccaaaacaggtgagcaacaggcaatggcacttgtaattattggtggtattttaattgctttagccttacgattactatcaaaacatcggaaacatcaaaataaggattagcatgggacaaaaatcaaaaatatctctagctacgaatattcgtatatggatttttcgtttaattttcttagcgggtttccttgttttggcatttcccatcgttagtcaggtcatgtactttcaagcctctcacgccaatattaatgcttttaaagaagctgttaccaagattgaccgggtggagattaatcggcgtttagaacttgcttatgcttataacgccagtatagcaggtgccaaaactaatggcgaatatccagcgcttaaagacccctactctgctgaacaaaagcaggcaggggtcgttgagtacgcccgcatgcttgaagtcaaagaacaaataggtcatgtgattattccaagaattaatcaggatatccctatttacgctggctctgctgaagaaaatcttcagaggggcgttggacatttagaggggaccagtcttccagtcggtggtgagtcaactcatgccgttctaactgcccatcgagggctaccaacggccaagctatttaccaatttagacaaggtaacagtaggtgaccgtttttacattgaacacatcggcggaaagattgcttatcaggtagaccaaatcaaagttatcgcccctgatcagttagaggatttgtacgtgattcaaggagaagatcacgtcaccctattaacttgcacaccttatatgataaatagtcatcgcctcctcgttcgaggcaagcgaattccttatgtggaaaaaacagtgcagaaagattcaaagaccttcaggcaacaacaatacctaacctatgctatgtgggtagtcgttggacttatcttgctgtcgcttctcatttggtttaaaaagacgaaacagaaaaagcggagaaagaatgaaaaagcggctagtcaaaatagtcacaataattcgaaataataaaatcagaaccctcatttttgtgatgggaagtctgattctcttatttccgattgtgagccaggtaagttactaccttgcttcgcatcaaaatattaatcaatttaagcgggaagtcgctaagattgatactaatacggttgaacgacgcatcgctttagctaatgcttacaatgagacgttatcaaggaatcccttgcttatagacccttttaccagtaagcaaaaagaaggtttgagagagtatgctcgtatgcttgaagttcatgagcaaataggtcatgtggcaatcccaagtattggggttgatattccaatttatgctggaacatccgaaactgtgcttcagaaaggtagtgggcatttggagggaaccagtcttccagtgggaggtttgtcaacccattcagtactaactgcccaccgtggcttgccaacagctaggctatttaccgacttaaataaagttaaaaaaggccagattttctatgtgacgaacatcaaggaaacacttgcctacaaagtcgtgtctatcaaagttgtggatccaacagctttaagtgaggttaagattgtcaatggtaaggattatataaccttgctgacttgcacaccttacatgatcaatagtcatcgtctcttggtaaaaggagagcgtattccttatgattctaccgaggcggaaaagcacaaagaacaaaccgtacaagattatcgtttgtcactagtgttgaagatactactagtattattaattggactcttcatcgtgataatgatgagaagatggatgcaacatcgtcaataacgatgttgtgaatggcttacttacttatcaaataggtgactaatgatgattgtgaataatggttatctagaagggagaaaaatgaaaaagagacaaaaaatatggagagggttatcagttactttactaatcctgtcccaaattccatttggtatattggtacaaggtgaaacccaagataccaatcaagcacttggaaaagtaattgttaaaaaaacgggagacaatgctacaccattaggcaaagcgacttttgtgttaaaaaatgacaatgataagtcagaaacaagtcacgaaacggtagagggttctggagaagcaacctttgaaaacataaaacctggagactacacattaagagaagaaacagcaccaattggttataaaaaaactgataaaacctggaaagttaaagttgcagataacggagcaacaataatcgagggtatggatgcagataaagcagagaaacgaaaagaagttttgaatgcccaatatccaaaatcagctatttatgaggatacaaaagaaaattacccattagttaatgtagagggttccaaagttggtgaacaatacaaagcattgaatccaataaatggaaaagatggtcgaagagagattgctgaaggttggttatcaaaaaaaattacaggggtcaatgatctcgataagaataaatataaaattgaattaactgttgagggtaaaaccactgttgaaacgaaagaacttaatcaaccactagatgtcgttgtgctattagataattcaaatagtatgaataatgaaagagccaataattctcaaagagcattaaaagctggggaagcagttgaaaagctgattgataaaattacatcaaataaagacaatagagtagctcttgtgacatatgcctcaaccatttttgatggtactgaagcgaccgtatcaaagggagttgccgatcaaaatggtaaagcgctgaatgatagtgtatcatgggattatcataaaactacttttacagcaactacacataattacagttatttaaatttaacaaatgatgctaacgaagttaatattctaaagtcaagaattccaaaggaagcggagcatataaatggggatcgcacgctctatcaatttggtgcgacatttactcaaaaagctctaatgaaagcaaatgaaattttagagacacaaagttctaatgctagaaaaaaacttatttttcacgtaactgatggtgtccctacgatgtcttatgccataaattttaatccttatatatcaacatcttaccaaaaccagtttaattcttttttaaataaaataccagatagaagtggtattctccaagaggattttataatcaatggtgatgattatcaaatagtaaaaggagatggagagagttttaaactgttttcggatagaaaagttcctgttactggaggaacgacacaagcagcttatcgagtaccgcaaaatcaactctctgtaatgagtaatgagggatatgcaattaatagtggatatatttatctctattggagagattacaactgggtctatccatttgatcctaagacaaagaaagtttctgcaacgaaacaaatcaaaactcatggtgagccaacaacattatactttaatggaaatataagacctaaaggttatgacatttttactgttgggattggtgtaaacggagatcctggtgcaactcctcttgaagctgagaaatttatgcaatcaatatcaagtaaaacagaaaattatactaatgttgatgatacaaataaaatttatgatgagctaaataaatactttaaaacaattgttgaggaaaaacattctattgttgatggaaatgtgactgatcctatgggagagatgattgaattccaattaaaaaatggtcaaagttttacacatgatgattacgttttggttggaaatgatggcagtcaattaaaaaatggtgtggctcttggtggaccaaacagtgatgggggaattttaaaagatgttacagtgacttatgataagacatctcaaaccatcaaaatcaatcatttgaacttaggaagtggacaaaaagtagttcttacctatgatgtacgtttaaaagataactatataagtaacaaattttacaatacaaataatcgtacaacgctaagtccgaagagtgaaaaagaaccaaatactattcgtgatttcccaattcccaaaattcgtgatgttcgtgagtttccggtactaaccatcagtaatcagaagaaaatgggtgaggttgaatttattaaagttaataaagacaaacattcagaatcgcttttgggagctaagtttcaacttcagatagaaaaagatttttctgggtataagcaatttgttccagagggaagtgatgttacaacaaagaatgatggtaaaatttattttaaagcacttcaagatggtaactataaattatatgaaatttcaagtccagatggctatatagaggttaaaacgaaacctgttgtgacatttacaattcaaaatggagaagttacgaacctgaaagcagatccaaatgctaataaaaatcaaatcgggtatcttgaaggaaatggtaaacatcttattaccaacactcccaaacgcccaccaggtgtttttcctaaaacagggggaattggtacaattgtctatatattagttggttctacttttatgatacttaccatttgttctttccgtcgtaaacaattgtaaggtgtcgttgaaattattaaataatagaaaatgactagttttggcctttccctattgtcagtcagattagttattatcaagcttctcatgccaatattaatgcctttaaaagaacagttacaaccattgaccgtacggagattcaacgacggttaggtctggctaaagcctacaatgctagtatttctggaacaagtagtcagtcgactcaatctgtgctgagagattcttattctgaggagcaaaaaaggcagggtggactgaatacgctaggatgttagaagtcagagagcaggttgaccatgtgatgattccaaaaatcaatcaggatttaccaatctacgctggttcagaagaggacaatctgcaacggggagttggtcatctagaagggataagtttgccgattggaggggcttctacacatgcggtcttgagcggtcaaagaggtatgtcagctgctcggttgtttgcggatttggataagatgaaaaaaggtgattatttttatgttaccaatctgaaagaaaccttggcttatcaagtggatcgtatcatggtgattgaacctagccaattggatgccgtgagcattgaagaggataaagattatgttacccttctgacctgtacaccttatatgggctctttgtcaactgtaatgggtgacttatcattaacaacgagagagaatcagcttggttctctctctttttggatgttcaaagcgatgagaattttgcttttaaaatttttaaagttgcgaaagccaaaggcttgtcgcttgatgtctttgataagcttgttggtcgcttctaatttggcattggaaagggatagctgagggcgtttgtgatgtaagttttgtacttcatgaaggtcctaaagaccattttaaaagcagaattgccagttgttacgttatcatctatgaagctaaagaattcagttgttcgcttttcttagaaatgaaagagtatgagctgataaaggtcgttataatagcggagctcatctgagaaaacttttatacctcaaagtcagtctagctttgatatcatgaagccattaggagttattccttatcttttagtggcgcgcgatccatatagtgatagatcgagatatttagatccaaaagttctatcatcctcttttggcgccttttttccagcagataatattaaggtagcttggtctaacaactccagcactttatttacaccacctattaatgcaaactacaccactcagattcaagctattgggacaacgattaagtcacaaattccggaatcgattttgacggttacggataaaaagagcaggaagttcagcattaacaagattgacgaagctaaagaaggcttagtaggtgcgaccttcaccttgtctaaacgcacaacagtagcggcagatcatcaagtacaaggagatttcattcctgtcagcaaagagacgacagtcggtcggacaactcttacctttgacaaccttaaacctggattttatgaccttaaagaaacgaaagcgccgaatgcttacgtacttgatcctaagacttatgttgtggtcgttcaaaattcaggaaaaacgacaattgtggatgaagctaacttcaaagaggctgattacccaatggctgataataccagccatgtggagtgcgtagcgttgctacaacgaagcaaagggtaaaaatcctttattttaagcactttttcaagcattttgtctttattgaaaagagtgattttaacataaaaaaggtattaaaaaacatattgacgtgaccgtttgttttgaagtggcttgcgtagacaaaaaaatagatacgtcagataaatttctggcattacgagaacatttctagagtgttctctttttttagtttacggaggaaaaatatatatggaaaaacaggattcacgagttctcatccattgggaggggaattctggggacaagctcattgaacaccaaaccagcgcaacggggtggtactaccaagtcgatcgtagctttagtcaaccaaaaggggaaccgcccagaatgatccaaaggcactagaaagtgtccgtaatgattcgatttcgggcggtgatgatgtcatgggttatgcttatagcaaatgtacttggggagttgcggcacgaattaatcagtgggactgaaactcaaaggttgaaatggtgagaagattaccattaccagttcaatgggaaatggtcaggattgggttggaacagccgaaagactagatggtgaaactgatacagttccaaaagaaggtactattctctctttttaggaaagtagttatggttcgtatataggctacggaactatatctttcgtcacattacatctacagatagtaccatgaattttgcttatatgaccaagtaaagtgaggatatactaacaaatgaaatatttattatcgtatttgtccattttatcgaaaagtttgcatattatcattatgtttgataagatgcaaatataatgatagtaggagctaaatatggatatttaaaaaatcaagagtatcctaagtgctttccattttgaaattcaaatatagctaatagttctagaacttctaattgtttttcgtcgacgatatgaattttcaatcttaactgttaggattccacctccctttggttaaagaaaaaaggtcaggtcgtttagataactttgtcaaacaagctcaagctatctaaaaatagtttgaaatgggcattactctagtttttaataagctatctgatgagcagaaggagaagttaatgcatgttgggaagtcttattttgactatcaagaaaatgctcttatcccacaattaggttttctatattctaaattaactaaaaaaattgaacttgataatcggttgtctccgactgaacaaaagttattgattaccttattattacatactaaaggtttaatcattgatatgtaagaagtaagtcagctaaccgatctttctattctaaaacttatattgttgctttagaaattttaaagagcgtggatggcttcataataaacagaaatcttaccaatttgcgaagccaaaaaatatgatatttgaagagtccaaagatctaatagatagtccagttagagaagcgttgattataagtgataaggattttcaaaaattaaaacaagagctattattttaaccgacttattttaaagacttatcatatctaggcttgcttgatgattcggaaaaatacggagactatactatttcaaggaaaagatacaaaagtttcgaatcaagtcttcaactatacatccttcaaagtcatcggctagagatttggaattatgaaccaatccctttgattactagaaaaataaatagcttggagaggctaacgtgacactggttgatccaatctcgctttatttaacactaagaatgatgaagaccctcgtattgaagaagaagttgagcagctagaaga

SEQ ID NO: 478 - DNA, 13000 bp, Streptococcus agalactiae
taacacggattggaaataacatcaatcaaattgcgcgtgctatcaaccaaagccatctaatttctcaggctcagtatcactttcatcgagaagcacgttaagcccaacagcaggggggggtgctctgattcggttaagtaataagcaaaatcctcaccaattttcccagtaataagaggcgttgttgaggtatagggattacctgtgccatagtcgatgatggtcacaaaatgaccattccccataaaagggccaaccaaaacttcacctgtggccgttttttgatgtcaacaccagtattttggatgtaccccttaacatgccctttggtatctgcaacagagataatatgaccaaaggaagaatcaccgatgactttaaccgtaatcttgctatcgcctttttgattagccgctaatatttgattagcaatcagggtgcgaccaagagcaactgttgaagacgacaaggtatgatgtttttcctgagccaatttaacagtctcggtgctatcgaggacataagacctgaaggcaccagaggcagaaattgatttaataattttatccataacctatgttatagcacaaagagagagtttgtatggactggattagctgaaaattttagactaaaaagtagtgccagtggattttgaaaggtaacaaaagagtcttccgtttaaacgagaaggctgtttttagtcgtttcagatgaaggcaaaaggacgatgaaataattccgtaccttcatggattgctatgttactggcatgaggtctcacgatatttagtaagatattcgtttgaagatattcccacgtattttttaaaggttttaagaaaatgtgtggtgtcgtaaaaatgtaataatttcgctacttccccaatcggtacccctctttgcagtagtaattgtccctccttaatttttgcctttagaatataactttgcaaggaaatgtcagagtattttttaaaaaccgagcgtaagtgggaatctgagatatataggtagttggcaatatcagatactttgagtttggagtagaggtggttgtccacataatggagaatactattgtacatttgctgcttgtcagagatgctcttattggttaaggattctgaaaaatcaataagagctgcacagcgaattcttgaaacatcaataagatcaggagcctattcgtttaaagccatatagtgctttaccagcgcataacttttagccacatcagtattttcctcgaaacttaattctagtaattttgttaagtaaacaacagttaagttcttttcagctcttagggcagggattgaagatgaggtaacactggatgatgggaggcgattaatttcttgctttaacagttgagtgttacccagcttaacgagatcaataatgtgattgagatggtttaaaacagtgggtaactgaaaagagtttttcttagtatgttttaggtgaagaacaatatcaggatccgcaacaatctgttctgactcttctaataaatgattgatggcttgttggcaactagcctcaaactgtgtttggaaaaaggcatcgatagacacaagaagactacgtatactggtagtaggaaaacaagggacaagctttatataggataagatttcttttttactacgatgagaaaattgttctagaaagcgactggataactgttcttgcctattgatatcagggctatagggataaaatggtccaatagcaataagatattgacagacaggaaaaattaagaatgattcttcaaaaagaccctcataaacagtgatatcttggttataagggatagctaaatgttttaaaaactgatagtaaggcaacagatagtcttcgttaccatataactgaacgagttccttgtctcgtgacatgactgaaataggtagttgagatatggtatgcaatgtttgaacatgtttaaaatcgaatgtaaccatttgatagaccgccttcattatcatttctagaatttttctttaggtttgtaaagactacaaaataaaatgatgaaaacaactatcttgtggatacactaaaaagacacgctaattagcaaactctctcttcatcatctctcaccattattatactactatttatatgacaaataaaggtgattttgttaaaaatataactttgaaaatccacatatatttttaatcttccgtctgaaaaaaataaataaaaatagtaaaaataaacacgaatttaaaataagcaaattttttaagaaaatctgtgctaaactttaatagttttgtgcttaataataatcagcacttacaaagaacaaagggaaaagcgaggagagaacttttaatgaaattatcgaagaagttattgttttcggctgctgttttaacaatggtggcggggtcaactgttgaaccagtagctcagtttgcgactggaatgagtattgtaagagctgcagaagtgtcacaagaacgcccagcgaaaacaacagtaaatatctataaattacaagctgatagttataaatcggaaattacttctaatggtggtatcgagaataaagacggcgaagtaatatctaactatgctaaacttggtgacaatgtaaaaggtttgcaaggtgtacagtttaaacgttataaagtcaagacggatatttctgttgatgaattgaaaaaattgacaacagttgaagcagcagatgcaaaagttggaacgattcttgaagaaggtgtcagtctacctcaaaaaactaatgctcaaggtttggtcgtcgatgctctggattcaaaaagtaatgtgagatacttgtatgtagaagatttaaagaattcaccttcaaacattaccaaagcttatgctgtaccgtttgtgttggaattaccagttgctaactctacaggtacaggtttcctttctgaaattaatatttaccctaaaaacgttgtaactgatgaaccaaaaacagataaagatgttaaaaaattaggtcaggacgatgcaggttatacgattggtgaagaattcaaatggttcttgaaatctacaatccctgccaatttaggtgactatgaaaaatttgaaattactgataaatttgcagatggcttgacttataaatctgttggaaaaatcaagattggttcgaaaacactgaatagagatgagcactacactattgatgaaccaacagttgataaccaaaatacattaaaaattacgtttaaaccagagaaatttaaagaaattgctgagctacttaaaggaatgacccttgttaaaaatcaagatgctcttgataaagctactgcaaatacagatgatgcggcatttttggaaattccagttgcatcaactattaatgaaaaagcagttttaggaaaagcaattgaaaatacttttgaacttcaatatgaccatactcctgataaagctgacaatccaaaaccatctaatcctccaagaaaaccagaagttcatactggtgggaaacgatttgtaaagaaagactcaacagaaacacaaacactaggtggtgctgagtttgatttgttggcttctgatgggacagcagtaaaatggacagatgctcttattaaagcgaatactaataaaaactatattgctggagaagctgttactgggcaaccaatcaaattgaaatcacatacagacggtacgtttgagattaaaggtttggcttatgcagttgatgcgaatgcagagggtacagcagtaacttacaaattaaaagaaacaaaagcaccagaaggttatgtaatccctgataaagaaatcgagtttacagtatcacaaacatcttataatacaaaaccaactgacatcacggttgatagtgctgatgcaacacctgatacaattaaaaacaacaaacgtccttcaatccctaatactggtggtattggtacggctatctttgtcgctatcggtgctgcggtgatggcttttgctgttaaggggatgaagcgtcgtacaaaagataactaaataaaaggctacttcttaagtaaccatgtttaagaaaagagaaatagccttatttctctttttgtcgtttttaaaataaaggaacatcatgaaacaaacattaaaacttatgttttcttttctgttgatgttagggactatgtttggaattagccaaactgttttagcgcaagaaactcatcagttgacgattgttcatcttgaagcaagggatattgatcgtccaaatccacagttggagattgcccctaaagaagggactccaattgaaggagtactctatcagttgtaccaattaaaatcaactgaagatggcgatttgttggcacattggaattccctaactatcacagaattgaaaaaacaggcgcagcaggtttttgaagccactactaatcaacaaggaaaggctacatttaaccaactaccagatggaatttattatggtctggcggttaaagccggtgaaaaaaatcgtaatgtctcagctttcttggttgacttgtctgaggataaagtgatttatcctaaaatcatctggtccacaggtgagttggacttgcttaaagttggtgtggatggtgataccaaaaaaccactagcaggcgttgtctttgaactttatgaaaagaatggtaggactcctattcgtgtgaaaaatggggtgcattctcaagatattgacgctgcaaaacatttagaaacagattcatcagggcatatcagaatttccgggctcatccatggggactatgtcttaaaagaaatcgagacacagtcaggatatcagatcggacaggcagagactgctgtgactattgaaaaatcaaaaacagtaacagtaacgattgaaaataaaaaagttccgacacctaaagtgccatctcgaggaggtcttattcccaaaacaggtgagcaacaggcaatggcacttgtaattattggtggtattttaattgctttagccttacgattactatcaaaacatcggaaacatcaaaataaggattagcatgggacaaaaatcaaaaatatctctagctacgaatattcgtatatggatttttcgtttaattttcttagcgggtttccttgttttggcatttcccatcgttagtcaggtcatgtactttcaagcctctcacgccaatattaatgcttttaaagaagctgttaccaagattgaccgggtggagattaatcggcgtttagaacttgcttatgcttataacgccagtatagcaggtgccaaaactaatggcgaatattcagcgcttaaagacccctactctgctgaacaaaagcaggcaggggtcgttgagtacgcccgcatgcttgaagtcaaagaacaaataggtcatgtgattattccaagaattaatcaggatatccctatttacgctggctctgctgaagaaaatcttcagaggggcgttggacatttagaggggaccagtcttccagtcggtggtgagtcaactcatgccgttctaactgcccatcgagggctaccaacggccaagctatttaccaatttagacaaggtaacagtaggtgaccgtttttacattgaacacatcggcggaaagattgcttatcaggtagaccaaatcaaagttatcgcccctgatcagttagaggatttgtacgtgattcaaggagaagatcacgtcaccctattaacttgcacaccttatatgataaatagtcatcgcctcctcgttcgaggcaagcgaattccttatgtggaaaaaacagtgcagaaagattcaaagaccttcaggcaacaacaatacctaacctatgctatgtgggtagtcgttggacttatcttgctgtcgcttctcatttggtttaaaaagacgaaacagaaaaagcggagaaagaatgaaaaagcggctagtcaaaatagtcacaataattcgaaataataaaatcagaaccctcatttttgtgatgggaagtctgattctcttatttccgattgtgagccaggtaagttactaccttgcttcgcatcaaaatattaatcaatttaagcgggaagtcgctaagattgatactaatacggttgaacgacgcatcgctttagctaatgcttacaatgagacgttatcaaggaatcccttgcttatagacccttttaccagtaagcaaaaagaaggtttgagagagtatgctcgtatgcttgaagttcatgagcaaataggtcatgtggcaatcccaagtattggggttgatattccaatttatgctggaacatccgaaactgtgcttcagaaaggtagtgggcatttggagggaaccagtcttccagtgggaggtttgtcaacccattcagtactaactgcccaccgtggcttgccaacagctaggctatttaccgacttaaataaagttaaaaaaggccagattttctatgtgacgaacatcaaagaaacacttgcctacaaagtcgtgtctatcaaagttgtggatccaacagctttaagtgaggttaagattgtcaatggtaaggattatataaccttgctgacttgcacaccttacatgatcaatagtcatcgtctcttggtaaaaggagagcgtattccttatgattctaccgaggcggaaaagcacaaagaacaaaccgtacaagattatcgtttgtcactagtgttgaagatactactagtattattaattggactcttcatcgtgataatgatgagaagatggatgcaacatcgtcaataacgatgttgtgaatggcttacttacttatcaaataggtgactaatgatgattgtgaataatggttatctagaagggagaaaaatgaaaaagagacaaaaaatatggagagggttatcagttactttactaatcctgtcccaaattccatttggtatattggtacaaggtgaaacccaagataccaatcaagcacttggaaaagtaattgttaaaaaaacgggagacaatgctacaccattaggcaaagcgacttttgtgttaaaaaatgacaatgataagtcagaaacaagtcacgaaacggtagagggttctggagaagcaacctttgaaaacataaaacctggagactacacattaagagaagaaacagcaccaattggttataaaaaaactgataaaacctggaaagttaaagttgcagataacggagcaacaataatcgagggtatggatgcagataaagcagagaaacgaaaagaagttttgaatgcccaatatccaaaatcagctatttatgaggatacaaaagaaaattacccattagttaatgtagagggttccaaagttggtgaacaatacaaagcattgaatccaataaatggaaaagatggtcgaagagagattgctgaaggttggttatcaaaaaaaattacaggggtcaatgatctcgataagaataaatataaaattgaattaactgttgagggtaaaaccactgttgaaacgaaagaacttaatcaaccactagatgtcgttgtgctattagataattcaaatagtatgaataatgaaagagccaataattctcaaagagcattaaaagctggggaagcagttgaaaagctgattgataaaattacatcaaataaagacaatagagtagctcttgtgacatatgcctcaaccatttttgatggtactgaagcgaccgtatcaaagggagttgccgatcaaaatggtaaagcgctgaatgatagtgtatcatgggattatcataaaactacttttacagcaactacacataattacagttatttaaatttaacaaatgatgctaacgaagttaatattctaaagtcaagaattccaaaggaagcggagcatataaatggggatcgcacgctctatcaatttggtgcgacatttactcaaaaagctctaatgaaagcaaatgaaattttagagacacaaagttctaatgctagaaaaaaacttatttttcacgtaactgatggtgtccctacgatgtcttatgccataaattttaatccttatatatcaacatcttaccaaaaccagtttaattcttttttaaataaaataccagatagaagtggtattctccaagaggattttataatcaatggtgatgattatcaaatagtaaaaggagatggagagagttttaaactgttttcggatagaaaagttcctgttactggaggaacgacacaagcagcttatcgagtaccgcaaaatcaactctctgtaatgagtaatgagggatatgcaattaatagtggatatatttatctctattggagagattacaactgggtctatccatttgatcctaagacaaagaaagtttctgcaacgaaacaaatcaaaactcatggtgagccaacaacattatactttaatggaaatataagacctaaaggttatgacatttttactgttgggattggtgtaaacggagatcctggtgcaactcctcttgaagctgagaaatttatgcaatcaatatcaagtaaaacagaaaattatactaatgttgatgatacaaataaaatttatgatgagctaaataaatactttaaaacaattgttgaggaaaaacattctattgttgatggaaatgtgactgatcctatgggagagatgattgaattccaattaaaaaatggtcaaagttttacacatgatgattacgttttggttggaaatgatggcagtcaattaaaaaatggtgtggctcttggtggaccaaacagtgatgggggaattttaaaagatgttacagtgacttatgataagacatctcaaaccatcaaaatcaatcatttgaacttaggaagtggacaaaaagtagttcttacctatgatgtacgtttaaaagataactatataagtaacaaattttacaatacaaataatcgtacaacgctaagtccgaagagtgaaaaagaaccaaatactattcgtgatttcccaattcccaaaattcgtgatgttcgtgagtttccggtactaaccatcagtaatcagaagaaaatgggtgaggttgaatttattaaagttaataaagacaaacattcagaatcgcttttgggagctaagtttcaacttcagatagaaaaagatttttctgggtataagcaatttgttccagagggaagtgatgttacaacaaagaatgatggtaaaatttattttaaagcacttcaagatggtaactataaattatatgaaatttcaagtccagatggctatatagaggttaaaacgaaacctgttgtgacatttacaattcaaaatggagaagttacgaacctgaaagcagatccaaatgctaataaaaatcaaatcgggtatcttgaaggaaatggtaaacatcttattaccaacactcccaaacgcccaccaggtgtttttcctaaaacagggggaattggtacaattgtctatatattagttggttctacttttatgatacttaccatttgttctttccgtcgtaaacaattgtaaggtgtcgttgaaattattaaataatagaaaatgactagttttggcctttccctattgtcagtcagattagttattatcaagcttctcatgccaatattaatgcctttaaaagaacagttacaaccattgaccgtacggagattcaacgacggttaggtctgtctaaagcctacaatgctagtatttctggaacaagtagtcagtcgactcaatctgtgctgagagattcttattctgaggagcaaaaaaggcagggtggactgaatacgctaggatgttagaagtcagagagcaggttgaccatgtgatgattccaaaaatcaatcaggatttaccaatctacgctggtccagaagaggacaatctgcaacggggagttggtcatctagaagggataagtttgccgattggaggggcttctacacatgcggtcttgagcggtcaaagaggtatgccagctgctcggttgtttgcggatttggataagatgaaaaaaggtgattatttttatgttaccaatctgaaagaaaccttggcttatcaagtggatcgtatcatggtgattgaacctagccaattggatgccgtgagcattgaagaggataaagattatgttacccttctgacctgtacaccttatatgggctctttgtcaactgtaatgggtgacttatcattaacaacgagagagaatcagcttggttctctctctttttggatgttcaaagcgatgagaattttgcttttaaaatttttaaagttgcgaaagccaaaggcttgtcgcttgatgtctttgataagcttgttggtcgcttctaatttggcattggaaagggatagctgagggcgtttgtgatgtaagttttgtacttcatgaaggtcctaaagaccattttaaaagcagaattgccagttgttacgttatcatctatgaagctaaagaattcagttgttcgcttttcttagaaatgaaagagtatgagctgataaaggtcgttataatagcggagctcatctgagaaaacttttatacctcaaagtcagtctagctttgatatcatgaagccattaggagttattccttatcttttagtggcgcgcgatccatatagtgatagatcgagatatttagatccaaaagttctatcatcctcttttggcgccttttttccagcagataatattaaggtagcttggtctaacaactccagcactttatttacaccacctattaatgcaaactacaccactcagattcaagctattgggacaacgattaagtcacaaattccggaatcgattttgacgattacggataaaaagagcaggaagttcagcattaacaagattgacgaagctaaagaaggcttagtaggtgcgaccttcaccttgtctaaacgcacaacagtagcggcagatcatcaagtacaaggagatttcattcctgtcagcaaagagacgacagtcggtcggacaacccttacctttgacaaccttaaacctggattttatgaccttaaagaaacgaaagcgccgaatgcttacgtacttgatcctaagacttatgttgtggtcgttcaaaattcaggaaaaacgacaattgtggatgaagctaacttcaaagaggctgattacccaatggctgataataccagccatgtggagtgcgtagcgttgctacaacgaagcaaagggtaaaaatcctttattttaagcactttttcaagcattttgtctttattgaaaagagtgattttaacataaaaaaggtattaaaaaacatattgacgtgaccgtttgttttgaagtggcttgcgtagacaaaaaaatagatacgtcagataaatttctggcattacgagaacatttttagagtgttctctttttttagtttacggaggaaaaatatatatggaaaaacaggattcacgagttctcatccattgggaggggaattctggggacaagctcattgaacaccaaaccagcgcaacggggtggtactaccaagtcgatcgtagctttagtcaaccaaaaggggaaccgcccagaatgatccaaaggcactagaaagtgtccgtaatgattcgatttcgggcggtgatgatgtcatgggttatgcttatagcaaatgtacttggggagttgcggcacgaattaatcagtgggactgaaactcaaaggttgaaatggtgagaagattaccattaccagttcaatgggaaatggtcaggattgggttggaacagccgaaagactagatggtgaaactgatacagttccaaaagaaggtactattctctctttttaggaaagtagttatggttcgtatataggctacggaactatatctttcgtcacattacatctacagatagtaccatgaattttgcttatatgaccaagtaaagtgaggatatactaacaaatgaaatatttattatcgtatttgtccattttatcgaaaagtttgcatattatcattatgtttgataagatgcaaatataatgatagtaggagctaaatatggatatttaaaaaatcaagagtatcctaagtgctttccattttgaaattcaaatatagctaatagttctagaacttctaattgtttttcgtcgacgatatgaattttcaatcttaactgttagaattccacctccctttggttaaagaaaaaaggtcaggtcgtttagataactttgtcaaacaagctcaagctatctaaaaatagtttgaaatgggcattactctagtttttaataagctatctgatgagcagaaggagaagttaatgcatgttgggaagtcttattttgactatcaagaaaatgctcttatcccacaattaggttttctatattctaaattaactaaaaaaattgaacttgataatcggttgtctccgactgaacaaaagttattgattaccttattattacatactaaaggtttaatcattgatatgtaagaagtaagtcagctaaccgatctttctattctaaaacttatattgttgctttagaaattttaaagagcgtggatggcttcataataaacagaaatcttaccaatttgcgaagccaaaaaatatgatatttgaagagtccaaagatctaatagatagtccagttagagaagcgttgattataagtgataaggattttcaaaaattaaaacaagagctattattttaaccgacttattttaaagacttatcatatctaggcttgcttgatgattcggaaaaatacggagactatactatttcaaggaaaagatacaaaagtttcgaatcaagtcttcaactatacatccttcaaagtcatcggctagagatttggaattatgaaccaatccctttgattactagaaaaataaatagcttggagaggctaacgtgacactggttgatccaatctcgctttatttaacactaagaatgatgaagaccctcgtattgaagaagaagttgagcagctagaa

SEQ ID NO: 479 - DNA, 13008 bp, Streptococcus agalactiae
taacacggattggaaataacatcaatcaaatttcgcgtgctatcaaccaaagccatctaatttctcaggctcagtatcactttcatcgagaagcacgttaagcccaacagcagggggggttgctctgattcggttaagtaataagcaaaatcctcaccaattttcccagtaataagaggcgttgttgaggtatagggattacctgtgccatagtcgatgatggtcacaaaatgaccattccccataaaagggccaaccaaaacttcacctgtggccgttttttgatgtcaacaccagtattttggatgtaccccttaacatgccctttggtatctgcaacagagataatatgaccaaaggaagaatcaccgatgactttaaccgtaatcttgctatcgcctttttgattagccgctaatatttgattagcaatcagggtgcgaccaagagcaactgttgaagacgacaaggtatgatgtttttcctgagccaatttaacagtctcggtgctatcgaggacataagacctgaaggcaccagaggcagaaattgatttaataattttatccataacctatgttatagcacaaagagagagtttgtatggactggattagctgaaaattttagactaaaaagtagtgccagtggattttgaaaggtaacaaaagagttttccgtttaaacgagaaggctgtttttagtcgtttcagatgaaggcaaaaggacgatgaaataattccgtaccttcatggattgctatgttactggcatgaggtctcacgatatttagtaagatattcgtttgaagatattcccacgtattttttaaaggttttaagaaaatgtgtggtgtcgtaaaaatgtaataatttcgctacttccccaatcggtacccctctttgcagtagtaattgtccctccttaatttttgcctttagaatataactttgcaaggaaatgtcagagtattttttaaaaaccgagcgtaagtgggaatctgagatatataggtagttggcaatatcagatactttgagtttggagtagaggtggttgtccacataatggagaatactattgtacatttgctgcttgtcagagatgctcttattggttaaggattctgaaaaatcaataagagctgcacagcgaattcttgaaacatcaataagatcaggagcctcttcgtttaaagccatatagtgctttaccagcgcataacttttagccacatcagtattttcctcgaaacttaattctagtaattttgttaagtaaacaacagttaagttcttttcagctcttagggcagggattgaagatgaggtaacactggatgatgggaggcgattaatttcttgctttaacagttgagtgttacccagcttaacgagatcaataatgtgattgagatggtttaaaacagtgggtaactgaaaagagtttttcttagtatgttttaggtgaagaacaatatcaggatccgcaacaatctgttctgactcttctaataaatgattgatggcttgttggcaactagcctcaaactgtgtttggaaaaaggcatcgatagacacaagaagactacgtatactggtagtaggaaaacaagggacaagctttatataggataagatttcttttttactacgatgagaaaattgttctagaaagcgactggataactgttcttgcctattgatatcagggctatagggataaaatggtccaatagcaataagatattgacagacaggaaaaattaagaatgattcttcaaaaagatcctcataaacagtgatatcttggttataagggatagctaaatgttttaaaaactgatagtaaggcaacagatagtcttcgttaccatataactgaacgagttccttgtctcgtgacatgactgaaataggtagttgagatatggtatgcaatgtttgaacatgtttaaaatcgaatgtaaccatttgatagaccgccttcattatcatttctagaatttttctttaggtttgtaaagactacaaaataaaatgatgaaaacaactatcttgtggatacactaaaaagacacgctaattagcaaactctctcttcatcatctctcaccattattatactactatttatatgacaaataaaggtgattttgttaaaaatataactttgaaaatccacatatatttttaatcttccgtctgaaaaaataaataaaaatagtaaaaataaacacgaatttaaaataagcaaattttttaagaaaatctgtgctaaactttaatagttttgtgcttaataataatcagcacttacaaagaacaaagggaaaagcgaggagagaacttttaatgaaattatcgaagaagttattgttttcggctgctgttttaacaatagtggcggggtcaactgttgaaccagtagctcagtttgcgactggaatgagtattgtaagagctgcagaagtgtcacaagaacgcccagcgaaaacaacagtaaatatctataaattacaagctgatagttataaatcggaaattacttctaatggtggtatcgagaataaagacggcgaagtaatatctaactatgctaaacttggtgacaatgtaaaaggtttgcaaggtgtacagtttaaacgttataaagtcaagacggatatttctgttgatgaattgaaaaaattgacaacagttgaagcagcagatgcaaaagttggaacgattcttgaagaaggtgtcagtctacctcaaaaaactaatgctcaaggtttggtcgtcgatgctctggattcaaaaagtaatgtgagatacttgtatgtagaagatttaaagaattcaccttcaaacattaccaaagcttatgctgtaccgtttgtgttggaattaccagttgctaactctacaggtacaggtttcctttctgaaattaatatttaccctaaaaacgttgtaactgatgaaccaaaaacagataaagatgttaaaaaattaggtcaggacgatgcaggttatacgattggtgaagaattcaaatggttcttgaaatctacaatccctgccaatttaggtgactatgaaaaatttgaaattactgataaatttgcagatggcttgacttataaatctgttggaaaaatcaagattggttcgaaaacactgaatagagatgagcactacactattgatgaaccaacagttgataaccaaaatacattaaaaattacgtttaaaccagagaaatttaaagaaattgctgagctacttaaaggaatgacccttgttaaaaatcaagatgctcttgataaagctactgcaaatacagatgatgcggcatttttggaaattccagttgcatcaactattaatgaaaaagcagttttaggaaaagcaattgaaaatacttttgaacttcaatatgaccatactcctgataaagctgacaatccaaaaccatctaatcctccaagaaaaccagaagttcatactggtgggaaacgatttgtaaagaaagactcaacagaaacacaaacactaggtggtgctgagtttgatttgttggcttctgatgggacagcagtaaaatggacagatgctcttattaaagcgaatactaataaaaactatattgctggagaagctgttactgggcaaccaatcaaattgaaatcacatacagacggtacgtttgagattaaaggtttggcttatgcagttgatgcgaatgcagagggtacagcagtaacttacaaattaaaagaaacaaaagcaccagaaggttatgtaatccctgataaagaaatcgagtttacagtatcacaaacatcttataatacaaaaccaactgacatcacggttgatagtgctgatgcaacacctgatacaattaaaaacaacaaacgtccttcaatccctaatactggtggtattggtacggctatctttgtcgctatcggtgctgcggtgatggcttttgctgttaaggggatgaagcgtcgtacaaaagataactaaataaaaggctacttcttaagtaaccatgtttaagaaaagagaaatagccttatttctctttttgtcgtttttaaaataaaggaacatcatgaaacaaacattaaaacttatgttttcttttctgttgatgttagggactatgtttggaattagccaaactgttttagcgcaagaaactcatcagttgacgattgttcatcttgaagcaagggatattgatcgtccaaatccacagttggagattgcccctaaagaagggactccaattgaaggagtactctatcagttgtaccaattaaaatcaactgaagatggcgatttgttggcacattggaattccctaactatcacagaattgaaaaaacaggcgcagcaggtttttgaagccactactaatcaacaaggaaaggctacatttaaccaactaccagatggaatttattatggtctggcggttaaagccggtgaaaaaaatcgtaatgtctcagctttcttggttgacttgtctgaggataaagtgatttatcctaaaatcatctggtccacaggtgagttggacttgcttaaagttggtgtggatggtgataccaaaaaacacactagcaggcgttgtctttgaactttatgaaaagaatggtaggactcctattcgtgtgaaaaatggggtgcattctcaagatattgacgctgcaaaacatttagaaacagattcatcagggcatatcagaatttccgggctcatccatggggactatgtcttaaaagaaatcgagacacagtcaggatatcagatcggacaggcagagactgctgtgactattgaaaaatcaaaaacagtaacagtaacgattgaaaataaaaaagttccgacacctaaagtgccatctcgaggaggtcttattcccaaaacaggtgagcaacaggcaatggcacttgtaattattggtggtattttaattgctttagccttacgattactatcaaaacatcggaaacatcaaaataaggattagcatgggacaaaaatcaaaaatatctctagctacgaatattcgtatatggatttttcgtttaattttcttagcgggtttccttgttttggcatttcccatcgttagtcaggtcatgtactttcaagcctctcacgccaatattaatgcttttaaagaagctgttaccaagattgaccgggtggagattaatcggcgtttagaacttgcttatgcttataacgccagtatagcaggtgccaaaactaatggcgaatatccagcgcttaaagacccctactctgctgaacaaaagcaggcaggggtcgttgagtacgcccgcatgcttgaagtcaaagaacaaataggtcatgtgattattccaagaattaatcaggatatccctatttacgctggctctgctgaagaaaatcttcagaggggcgttggacatttagaggggaccagtcttccagtcggtggtgagtcaactcatgccgttctaactgcccatcgagggctaccaacggccaagctatttaccaatttagacaaggtaacagtaggtgaccgtttttacattgaacacatcggcggaaagattgcttatcaggtagaccaaatcaaagttatcgcccctgatcagttagaggatttgtacgtgattcaaggagaagatcacgtcaccctattaacttgcacaccttatatgataaatagtcatcgcctcctcgttcgaggcaagcgaattccttatgtggaaaaaacagtgcagaaagattcaaagaccttcaggcaacaacaatacctaacctatgctatgtgggtagtcgttggacttatcttgctgtcgcttctcatttggtttaaaaagacgaaacagaaaaagcggagaaagaatgaaaaagcggctagtcaaaatagtcacaataattcgaaataataaaatcagaaccctcatttttgtgatgggaagtctgattctcttatttccgattgtgagccaggtaagttactaccttgcttcgcatcaaaatattaatcaatttaagcgggaagtcgctaagattgatactaatacggttgaacgacgcatcgctttagctaatgcttacaatgagacgttatcaaggaatcccttgcttatagacccttttaccagtaagcaaaaagaaggtttgagagagtatgctcgtatgcttgaagttcatgagcaaataggtcatgtggcaatcccaagtattggggttgatattccaatttatgctggaacatccgaaactgtgcttcagaaaggtagtgggcatttggagggaaccagtcttccagtgggaggtttgtcaacccattcagtactaactgcccaccgtggcttgccaacagctaggctatttaccgacttaaataaagttaaaaaaggccagattttctatgtgacgaacatcaaggaaacacttgcctacaaagtcgtgtctatcaaagttgtggatccaacagctttaagtgaggttaagattgtcaatggtaaggattatataaccttgctgacttgcacaccttacatgatcaatagtcatcgtctcttggtaaaaggagagcgtattccttatgattctaccgaggcggaaaagcacaaagaacaaaccgtacaagattatcgtttgtcactagtgttgaagatactactagtattattaattggactcttcatcgtgataatgatgagaagatggatgcaacatcgtcaataacgatgttgtgaatggcttacttacttatcaaataggtgactaatgatgattgtgaataatggttatctagaagggagaaaaatgaaaaagagacaaaaaatatggagagggttatcagttactttactaatcctgtcccaaattccatttggtatattggtacaaggtgaaacccaagataccaatcaagcacttggaaaagtaattgttaaaaaaacgggggacaatgctacaccattaggcaaagcgacttttgtgttaaaaaatgacaatgataagtcagaaacaagtcacgaaacggtagagggttctggagaagcaacctttgaaaacataaaacctggagactacacattaagagaagaaacagcaccaattggttataaaaaaactgataaaacctggaaagttaaagttgcagataacggagcaacaataatcgagggtatggatgcagataaagcagagaaacgaaaagaagttttgaatgcccaatatccaaaatcagctatttatgaggatacaaaagaaaattacccattagttaatgtagagggttccaaagttggtgaacaatacaaagcattgaatccaataaatggaaaagatggtcgaagagagattgctgaaggttggttatcaaaaaaaattacaggggtcaatgatctcgataagaataaatataaaattgaattaactgttgagggtaaaaccactgttgaaacgaaagaacttaatcaaccactagatgtcgttgtgctattagataattcaaatagtatgaataatgaaagagccaataattctcaaagagcattaaaagctggggaagcagttgaaaagctgattgataaaattacatcaaataaagacaatagagtagctcttgtgacatatgcctcaaccatttttgatggtactgaagcgaccgtatcaaagggagttgccgatcaaaatggtaaagcgctgaatgatagtgtatcatgggattatcataaaactacttttacagcaactacacataattacagttatttaaatttaacaaatgatgctaacgaagttaatattctaaagtcaagaattccaaaggaagcggagcatataaatggggatcgcacgctctatcaatttggtgcgacatttactcaaaaagctctaatgaaagcaaatgaaattttagagacacaaagttctaatgctagaaaaaaacttatttttcacgtaactgatggtgtccctacgatgtcttatgccataaattttaatccttatatatcaacatcttaccaaaaccagtttaattcttttttaaataaaataccagatagaagtggtattctccaagaggattttataatcaatggtgatgattatcaaatagtaaaaggagatggagagagttttaaactgttttcggatagaaaagttcctgttactggaggaacgacacaagcagcttatcgagtaccgcaaaatcaactctctgtaatgagtaatgagggatatgcaattaatagtggatatatttatctctattggagagattacaactgggtctatccatttgatcctaagacaaagaaagtttctgcaacgaaacaaatcaaaactcatggtgagccaacaacattatactttaatggaaatataagacctaaaggttatgacatttttactgttgggattggtgtaaacggagatcctggtgcaactcctcttgaagctgagaaatttatgcaatcaatatcaagtaaaacagaaaattatactaatgttgatgatacaaataaaatttatgatgagctaaataaatactttaaaacaattgttgaggaaaaacattctattgttgatggaaatgtgactgatcctatgggagagatgattgaattccaattaaaaaatggtcaaagttttacacatgatgattacgttttggttggaaatgatggcagtcaattaaaaaatggtgtggctcttggtggaccaaacagtgatgggggaattttaaaagatgttacagtgacttatgataagacatctcaaaccatcaaaatcaatcatttgaacttaggaagtggacaaaaagtagttcttacctatgatgtacgtttaaaagataactatataagtaacaaattttacaatacaaataatcgtacaacgctaagtccgaagagtgaaaaagaaccaaatactattcgtgatttcccaattcccaaaattcgtgatgttcgtgagtttccggtactaaccatcagtaatcagaagaaaatgggtgaggttgaatttattaaagttaataaagacaaacattcagaatcgcttttgggagctaagtttcaacttcagatagaaaaagatttttctgggtataagcaatttgttccagagggaagtgatgttacaacaaagaatgatggtaaaatttattttaaagcacttcaagatggtaactataaattatatgaaatttcaagtccagatggctatatagaggttaaaacgaaacctgttgtgacatttacaattcaaaatggagaagttacgaacctgaaagcagatccaaatgctaataaaaatcaaatcgggtatcttgaaggaaatggtaaacatcttattaccaacactcccaaacgcccaccaggtgtttttcctaaaacagggggaattggtacaattgtctatatattagttggttctacttttatgatacttaccatttgttctttccgtcgtaaacaattgtaaggtgtcgttgaaattattaaataatagaaaatgactagttttggcctttccctattgtcagtcagattagttattatcaagcttctcatgccaatattaatgcctttaaaagaacagttacaaccattgaccgtacggagattcaacgacggttaggtctggctaaagcctacaatgctagtatttctggaacaagtagtcagtcgactcaatctgtgctgagagattcttattctgaggagcaaaaaaggcagggtggactgaatacgctaggatgttagaagtcagagagcaggttgaccatgtgatgattccaaaaatcaatcaggatttaccaatctacgctggtccagaagaggacaatctgcaacggggagttggtcatctagaagggataagtttgccgattggaggggcttctacacatgcggtcttgagcggtcaaagaggtatgtcagctgctcggttgtttgcggatttggataagatgaaaaaaggtgattatttttatgttaccaatctgaaagaaaccttggcttatcaagtggatcgtatcatggtgattgaacctagccaattggatgccgtgagcattgaagaggataaagattatgttacccttctgacctgtacaccttatatgggctctttgtcaactgtaatgggtgacttatcattaacaacgagagagaatcagcttggttctctctctttttggatgttcaaagcgatgagaattttgcttttaaaatttttaaagttgcgaaagccaaaggcttgtcgcttgatgtctttgataagcttgttggtcgcttctaatttggcattggaaagggatagctgagggcgtttgtgatgtaagttttgtacttcatgaaggtcctaaagaccattttaaaagcagaattgccagttgttacgttatcatctatgaagctaaagaattcagttgttcgcttttcttagaaatgaaagagtatgagctgataaaggtcgttataatagcggagctcatctgagaaaacttttatacctcaaagtcagtctagctttgatatcatgaagccattaggagttattccttatcttttagtggcgcgcgatccatatagtgatagatcgagatatttagatccaaaagttctatcatcctcttttggcgccttttttccagcagataatattaaggtagcttggtctaacaactccagcactttatttacaccacctattaatgcaaactacaccactcagattcaagctattgggacaacgattaagtcacaaattccggaatcgattttgacggttacggataaaaagagcaggaagttcagcattaacaagattgacgaagctaaagaaggcttagtaggtgcgaccttcaccttgtctaaacgcacaacagtagcggcagatcatcaagtacaaggagatttcattcctgtcagcaaagagacgacagtcggtcggacaactcttacctttgacaaccttaaacctggattttatgaccttaaagaaacgaaagcgccgaatgcttacgtacttgatcctaagacttatgttgtggtcgttcaaaattcaggaaaaacgacaattgtggatgaagctaacttcaaagaggctgattacccaatggctgataataccagccatgtggagtgcgtagcgttgctacaacgaagcaaagggtaaaaatcctttattttaagcactttttcaagcattttgtctttattgaaaagagtgattttaacataaaaaaggtattaaaaaacatattgacgtgaccgtttgttttgaagtggcttgcgtagacaaaaaaatagatacgtcagataaatttctggcattacgagaacatttctagagtgttctctttttttagtttacggaggaaaaatatatatggaaaaacaggattcacgagttctcatccattgggaggggaattctggggacaagctcattgaacaccaaaccagcgcaacggggtggtactaccaagtcgatcgtagctttagtcaaccaaaaggggaaccgcccagaatgatccaaaggcactagaaagtgtccgtaatgattcgatttcgggcggtgatgatgtcatgggttatgcttatagcaaatgtacttggggagttgcggcacgaattaatcagtgggactgaaactcaaaggttgaaatggtgagaagattaccattaccagttcaatgggaaatggtcaggattgggttggaacagccgaaagactagatggtgaaactgatacagttccaaaagaaggtactattctctctttttaggaaagtagttatggttcgtatataggctacggaactatatctttcgtcacattacatctacagatagtaccatgaattttgcttatatgaccaagtaaagtgaggatatactaacaaatgaaatatttattatcgtatttgtccattttatcgaaaagtttgcatattatcattatgtttgataagatgcaaatataatgatagtaggagctaaatatggatatttaaaaaatcaagagtatcctaagtgctttccattttgaaattcaaatatagctaatagttctagaacttctaattgtttttcgtcgacgatatgaattttcaatcttaactgttaggattccacctccctttggttaaagaaaaaaggtcaggtcgtttagataactttgtcaaacaagctcaagctatctaaaaatagtttgaaatgggcattactctagtttttaataagctatctgatgagcagaaggagaagttaatgcatgttgggaagtcttattttgactatcaagaaaatgctcttatcccacaattaggttttctatattctaaattaactaaaaaaattgaacttgataatcggttgtctccgactgaacaaaagttattgattaccttattattacatactaaaggtttaatcattgatatgtaagaagtaagtcagctaaccgatctttctattctaaaacttatattgttgctttagaaattttaaagagcgtggatggcttcataataaacagaaatcttaccaatttgcgaagccaaaaaatatgatatttgaagagtccaaagatctaatagatagtccagttagagaagcgttgattataagtgataaggattttcaaaaattaaaacaagagctattattttaaccgacttattttaaagacttatcatatctaggcttgcttgatgattcggaaaaatacggagactatactatttcaaggaaaagatacaaaagtttcgaatcaagtcttcaactatacatccttcaaagtcatcggctagagatttggaattatgaaccaatccctttgattactagaaaaataaatagcttggagaggctaacgtgacactggttgatccaatctcgctttatttaacactaagaatgatgaagaccctcgtattgaagaagaagttgagcagctagaagataagat

SEQ ID NO: 480 - DNA, 14050 bp, Streptococcus agalactiae
  misc_feature (1)...(14050): n = A,T,C or G
ggccttgttccgatgttgatcccgataactcctggctcattaatagcctgttcgtaacgctctttaattatctctaacttagcatgggtattggtaaaattttgaaaatagactaagtatttattaacctcaggccactttctatgcatgaaatcaatttctttatagaattgttcacgaataggagcttctggagcaactatagcatcccctgaaccagaaactgtgcaaaaagtgcaccctcctctagcaactgttccgtctctgttaggacagtcaaaaccagcatctataggtaatttaaatattttttctccaaagagttctcgataataatcattaatcgcacgataacgttttttcataggataattgtatcacaattttaactaaaataacctcactactacaataaaactaaaaaagattggaacgtcagttagtcccaatcttttatttacttcactttctttaaccaatccttggctaaaaagatatacgcagttagattcaaaataccataagcaagtataaaaccagctaaaacatctgtcggaaaatgaacccctaggtaaatacgagataacccaattaaaaaaatgagcaaacccaaagtaccttggcacaacagtttccatatactcttaggcatatagtactgcaataaaataataatactcccaaatatcataaatgttcccatcgagtgcccactgggaaacgaatagccacctgcaaatactaaatgggttaaagttggtcttactctttgaaaaataagttttaaagaaagtatacatataccagagataatagcatttactgcgataaatctagcttgaggataccacttcttaaggtaacagaaagtgacgctcataatcgcaatagctatctggcttacagtattaccaatcacagtgattaacttgaaaaatcttgtagaaagatttggcaactgtcctctaacactttcttgaatagtttggtcaaatgaaattacagtgtcgggccaatatttgatgaccaatcctaaactgaaaaataagataatagcaataaatgcttgaataagtttactattttgacgagataacattagtctttttatatctttctaatattggcaaacaagccacgtaagttagatagaaaacaatcgaaattaaaattccctcaacgatattaaatggaataaccattgttaaaaggtaattgcctacaccaataaatgttctgatatcaaagttagcaaatatagcatacaaaggaatcgcaaagacatagttgagagctaccatagatacggtcaagctaactgtaccaaatagactagctttaataaaatcttttgcactctctctatttttccagaaaatagcgaaacttgctaaaaataaagctagagcaaccatattcatcggtaaaccaataaacgtttctggaccacgattagcaagtataacttttaaaagtgatcttaataagagtacaccataacttgatttcaaatcaaataaaataaaagcaactaacatcggaaggattgaaaaatcaacctttaaaaattctgctcctggtattaatggaaatgaaaccatcatcaatacaaaagataaggcagaaagaatggcgattgtcaccattttacgtgtatttgtcataaaaaaattcctccaatttaaataaattgaaagaagctccaaaggtaagcgtatgtacgcgaaaaaacctttgtcttctcccatccagactttactgtcggttgtggaatctcaccacatcagctttcgctcgcggactgatgcttcacaactgacaaataagttggaagcgattaccgccggtcgggaattacaccctgccctgaagacacctatagcataacaaaaaaaacttgcaattgcaagttttttaattactaattagtagtagtgattaaaaatcatattaataccaaattactatactgtatcgtttctttcagatttgctatttttagtttttcttaaaaagataaacaaaattcccaaaataatacaaccaagaattgtcagtcctccaccaataatcattcctgttttaggaagaaatgattgtggaaaaagcggttgtgatggtttaggatttgttggtggaggagtttctttttcgttttctacctctacttcctgtgttttattagcaactacagcaactacagcatccttcatagatatacggtaaccagttagtgcttttgcttctcgaaaaatatacttaccaggtaataaaccttcaacctcaatttctcccttatcatcagttactaatgaagtaatcccatcttgatcggtcgtaaatcgtccatttttaaagcgaactggctgattctggttatcgtataatacaaatattactccggatagccttttctttatctttccttcttttgtatatttaataagttttaatcggcctgtttcaacttttcgcttaggatttatctgtaattgatttgataacttatcatctggtaattcaatataaaaaggtactattgttgaaacgctttgatcagctttataagcacgaccaaagtacgaaccatttgggagtgctatctttgtctgaccattagtatcagtaggagaagtcaagatactcttatacttctggttcaattcgctatctgtcatttggctcaataaatcaacttttaagttgtcagtcacagtccataaacgataagaaatcccctcctctgtagtatttggctgaagtcctatctgtgtgattgttagttgattaggggtatcagcatttacactggctaccgaaaaaaacgctaattgtaccaatcctaaaaagcaacatagtagaagtcctaaactttttctaatctttttcatttttgatttccctttctctttctctctttaaattttcgttttaaatataatagtaaagcgactaatataagaataactaggattgataagaggaaataaagtttatagtgtgtttgcaattctttcattaaatagttcttttctttaacaggaggtacatacttgattcgatgccctctaactagtaaacgatgtgaattaatcgaataaggtgtacatgttagcaaagtcgcataatccttacctttaacaaccaataatttagaaaaattatctggctttacaacacttatttgatcaaccttataggctaaaacttctttgatattatgaatataaaaaatttttccttttttaagtttatctaaatctgtaaataacttagctttaggtaagccgcgatgagctgtgataacagtatgtgaactttttccaccaattggcaaggaggttccttcaaggtgtcctgctcctttttcaagaacactactggtagtccccgcatagataggtaatttttgcttgatagacggtatatcaatatatccaatcatttcagcaatctcaagcatgtgggcgtattcagcaataccttttttttctttttcagtatagggatctgataggcggcttgggtccagtgttctattataagcttttgctaactcaaatcgtctattaatctctttagtatttaatttttgggtttgattatcaaagttagttacttgattattagctttaatattatagtaccaatttgaaataaaaggatatgaggttatcaaaagaccaactaagaacaatagtatcaagcctacattcatccatcgatttaaaacgaccgatttcttaaggtttttctgaaattttcctcccattatgattcaattccttttctaacacttgctaaacgatttttttgacgttgacgttttattaaccaaagtaaccaagcaataataactaaagatatatagaaaagatatctataaatcgtgtttaaatgaccgtcttttattaatttttcatcaataggacctttataagggatacgatgtccccttactaaaagtctgtgtgtattgaccataatcggggtgcaagtcaataaggttgcataatcatgtccaggaacaaccaacaaatctgaaaagttatcgggtgtaacgacttttatctgatctacttgatatgctatcgtttcttttatgttttgaatataaaacttatctcctttttttaactttttaaggttagaaaagagttctttatctggaattcctgaatgcgctgttataacagtatgtgtactattgccctcaattggaagagaggtaccttctaaatgccctgctcctttagatagaacttcttgacttgaacctgcaaatatagggagtttttgacctatcttaggaactgaaattgtgccgattttttcacttacctctaacatacgggcgtactctgctacccccttttgaattcgttttttctcataaggatcttcaagatggacattatttaaagaatcattataagcttgtgctagagccatacgtcgattgatttctttctgactaagttttttagcagctctctcaaaatcctgtgtttgattattagattctatcgtatagtaaaaacgtgataccactggatacaataaaatagatagacctattagaaaaagaatgataaaaggaagatttgacttcttcttttttgtttttttgatgatttttttagtcttcacgtcatctcctaaataatggctcttgcttatgatctaagagtacttctactgaaatacccttagatcataagcacagctttaactgtgcttatacatcatcaaagactagccttaagcttcctctgattgacgtcttttcatgataactactgctccaagcataatgcttaaaccaataattgtgaaaagaattgtaccaataccacctgtttgtgggattgttacctttttattttctactcgttgcgcatctttttttttgctgctagcagcgtagtcaatgttacctgaaccttttctgtatgacctttgattaacttcaaacttaacatcacctgccaatttagcataacctgctggagcttgtgtttcttcaaggttgtaagtaccttctgcaagacctgtaacttcaaattgaccttgatcgtttgaagtcaatttaacaactttagcagctttttatctgttacccactcataagctgtacgagcttcaatgaaggctgcattgtaagcttcttgtttagttttgatagttgcttttgctgttttacctttttgacctttttgttcttctgcagacaacttgttataagctgcgatagcttcatctaaagctattttagtagtagctaaagctgttttttgagctgcttttgcttcatctgctttaagtgcaaggtatttacctgctgagtttttaacaacgaattgtgcacctgccaagcgttcagtttcaggttcatttgttttgacaaatttcttaccatgagtcacaacttttggttcagttgggttgattggtgttgggttatctgaatctttggtattggtgatggttacattaccattttcaagagttattgcagtaccgtaaccagtaacacgttctgagatcatgtatgttttattatcatccagaccagtgaatttacctgcgaagttaccagatactgtaaatttgataccattaccaatgtcgattgtaccattaggtgtttttgtcaatgatactgaagcaacagctgtatcattatctttaaatgtgtaaacaacgtttacattatctggttcactaccttctgcccaagttttagtaactgttatttcaccctttgatggtgtaactggtagttctttcatttctttacctggtttgttaccatagtccaatttgatatcattggtttctggattttcaacaatagctggaccgttaacagtagctctataagtcaatgtgaattcaacatcttttgtttttgctgctttttccacttttgccaaacctttagctgtgaattttaatgtgaaaccacggtcatcagttccaagtttgtagtctgtatccttaacaaaagttcctgccgatgcttcaaggttaacagtgttacccattgtcaaaccatttgacatgctatctgtccaaaccaagtttttgtatttagaacctttgtgaatttttgttttaacttcgtaaggtataactttaccgatttcagcagtagcagttgctttgtctttttgatagttagcataatctgcgccagctgtcaaaagtctattaacactgtcaattgtcaagttgtttgttttagcaaagtttttatctatttgtggtttttcttcagtgttctttggataaacgtgagcatcttcaacaacaccatcttcgtttaccaatggaagagtgattttaactggaactgcttttgaatcagccaggatggaaccattattgttgtaagtagatttttctttcaattcaacgatttggtactttccttttaattttgtagtgttaaaaacaatacctttgtctgttgtcaatcctttaagaacaccatcttcattaatttctgttggttttaatttgttacttccttaccactttccgtaatgtattttgttttatcttcattcataacagcaaagaaagcaccttcgatttctttagatccttcgccaaagtaacctgtaaggtcagtaatttgtttacctatgtagtcttttccattcataccttttgttcctgggaagttacttttgtcaaaattagcttgtgtttggacaatcttgtgcaaggtcactgtattagttgttgcttcatccgcaaacgctggtgcaactgagaacaatgacgttaaagtcagtaacaatgccgagaacattgcaaaatatttgttgattcttttcatttctatctccttcttattttagttaatcaacatgattaataatatgcggattttaatacaccgcagcaccactcccttcaagtcatggaattttagttaattaattaagaatactaaagcgcataatttttaatcttttttgatggacatatcactagatttcttataccttttccaaatataaattccacctgcaatagacatcatagctccacctattaaaatgaaagatagaattcctttcccacctgtcataggaataattccttttggtggaatatgcgtgttggtaattaaatgcttgtcaccttcctcatgatattcagaaatctgtttattaacagctattatattttttatcgatcctttaaccacttcaaaagttaaaattggtttattagtaattttttgataatcctccggcgaaactgcttctattaactgatatttgccatctttcaaatctttgtaagaaattttgccgttttctcccgtcactacttttgaattattattttttattggtaaataaagtttataatcttcattaaattcttgaagttcaaacgtagctcctttgagaagcaacttattattatctttatcaacttttataaattcaatttcacctaacttcttctcgtttttaatcgttattgtaggatattctctcacatcacgaattttagggattggaaaatctctaagtgtattaggatcctctgacttaggattcaatgttgttctaccattagtgtcatagaatttgttacttataaaactgtcatctagtttcacatcatatgtgagtgttactttttgaccttctcctaaattcaaacctctaacatagagtttatttccgatgtattctaatttaacccccttaagtattccaccatcattattaggcccaccagttgcaataccatccttcattacacttccatcatttccctgtaaagtataatcacttggctgtaatgtttgtccattaccaagctgtaaattgattttatcacccataggatcttcgatagttccattaacaattgagttttcttttgttaaaatcgtttcaaattgttgctgaattttagataaaatttcattgttagatgtatcggctgaagttacgataggggtgtagtactcaggtttggaagagaacgacctcattagttctgtgatttctccatctgaaagtttaaaagcttcctctttcaatttttgaaaagtaccatcttgatttttcttatactcctcattataaacttgtctaaaaccagatatatcgataccaaaattaaaaatgtcataatttttctgttttaaactatttatataaagtttggttggtgttccatgttctttcactggtccatttcgataaattgtacctttagggtaattaagatttaaatctaaataatgaagtttttgtaagtttccagagattatctgtgtttgataactatctaagggaaacaaaaagtaactctccccatttccttttatatcctcgggcttatcagtaagtagaaaattacttttatttagatatccattttttttcatttgttcaaattggctttcatatgatgcacccagtttaaaattattaatagcatatgatctcgtaggaacaccatcagttacatgaacaataattttttgactatttcgatttacttgactcaaaatatcatctgcctccatgaaggctttcatagtaaatgtttctcctactttactaagatagtactccttttgttgctctggagttaatccattggtagtagatccccacttagctttaggagcttctgtcggaatcctttttataatctcttcagcattatttgttaattgtttatgactataattctctgtctgaattgtgaacttagtttgaaggccataatatttatcatcttctttaaatccttttacgacatctacactcctaccatcaaaaatatctgaaccataggtaactaatgcaaccctattatcactgtttgctcctaaaatatcttttactgcggtcccaagagcttcggcagctttcttggctttattatgcctttgaaaatttgggccatcgttattcattgagttagaattatcgagtacgaagacaacatctaacggcttttgtttgtccactggttttactatggtttttccactgacagttaactcaattttatatttattatgagctaaatcacctacttctgaaatacgtttagataatgttccctctggaatttctcttatatgctcaccttcacttgaatatgggttaactgcttttgcctctgactttccatttggaactgaacctttaacatgctcaagtttataagattcctttgtatcttcataaattcctgtggggggatactgcttatctagttcttcctgattttgtccaattgtggaatttttatcaccactattttgtatcgtagtttttccattactctcaaccttaacttgccaagtctggttagtctttttataaccttcgggcgctgtttcttctgataaagtataatctccaggtatgagattatcaaaagtagcttcacctgttagctcagcagttactttttctattttactttctggatgagcagtagtttttaaaacaaaggtagcttttgaaagtggtttgttctggtcatctgtctttttaacaactaactttcctttagcaccattttccggtacggtactttcccctaaaacattggtattaagcggtatttgcgacaaacaaaaaagacttaacgtcaatattttagaaaatttttggtattttctcattttacaactcctattgtgccgaaatgtcgtttctaaatctaagatcagatacagaatatcctagaatatacaaactatcacttattatgatatcaataatttcttattataaggtatggaattttaatgttttttcccaatttttgaataatttttctttttatttgataatcttattttttattatcttagaaatatttcaatgagcttaagtagttgatttttctttttttatgttttaaaatattgcttaaaaataatgtttgagagagtttactgaattgattgaaaattatttagaaaaagacatccttaatcaaataaaacttctaactttatgctatgattactacccttccattactctagacaaatcatgtcatcaacttggtttatctgaactacttattaggaaatattgtcatgatttaacaactttatttaacagtcaactctctctgaatatcgaaaagagtacaatagtctaccaatctaatggtgtaactagagaacaagctttcaaatatatttatcatcaatcacacgttttacaacttttaaaatttttgatcacgaatgattcaggcaggttacctttaacttactttagtgaaaaatttggactatcttgtgcaactgcttatcgcatacgaaaacatattagtccattactagaaaaacttggatttcagattgtcaaaaatactattaccggtgacgagtatcgaattcgctatttaatcgcatttttaaatgctcaatttggtatagaagtttatcccatgtctaagatggataaattgctcatcaaacgattgttattagaacactcaactacttttactgcttctcattacttcccaaatacatttattttctttgatacattgttgtctctatcatggaaacgtattaattataatgtagttgtcccttactcatcccttttcactgaactacaaaatatatttatctatgatacattacaatattgtgtcaaaaatgttattatagattcctttaaaattaatttaaaaaaagacgatatagactatatttttcttgcttaccttacttcccataactctttttctaatccaaattggactgagaagcgtatcgataatgtaatagctattttcgaaaattatcccaaattccaaaaattattacagccactcaaagatgctcttcccttatctggctcctatcatgatgagttggtaaaagttgctatcttttttttccgaacatttattttaggattaaatcaattaatccctgaaacaatttcatttccttcatggaactatcatagacatgataaattaactactattctccgaccgataattacaaattggttaagtaaaattggagaatacacgtttaaagaacaacattttcttctcctttgtactcatctagaaagaatcatcaaaaatcatattcctccgatacagatagccgtactaactacagactttattaataaccaaattttaacagaatgcttattacagagattttcttctaaaaagattcatttccacccttactatttattaactgatgatctttccaatattactaatcttaatccagacattattattaccaataaaaagctttctccctttatcaaacatgagatttcttcagagagtttaattacatatattgatctgattaatacttcagaccaaatcaatcaaatccaaaaaattatttcatcaatacaggaagaaaaatattgcaaactttttgcaaaaactaatgaaataactaatcgtagctcctataactcttaaaaattaacattaaaaagctagagcattgtgtaatgctctagctttttaatgttaatttttttgaataatataatccaacttttcaactgttttttcccatgtgaaatgttctttaattcttttagcaatattctgttgtagtttctctcttaatgccttatcttttactaataaatcaagagattcatggagtgactgagtattttcttccatgatgattcctaactcagggctatcaataacttcaactgttccaccgcgatctgttgcaataatagcacttgaaagtagaccagcttctaaaatagaggttggtaatccctctggatacattgaagggtaaacaaagatatcagtctgtgccattaaagacatagtctgttcaaagtttaatttccccaaaaagttaatctgtttggactgatatttctctttcaaatgtgctaattcaggtccgtctcctgcaatctgtaaataaacattttcagagtactgtgacatcgaaaatgcttctaagagcaattcaatgcctttttctttaataattctaccagcataagtgatgaaaatatcatcagcagatttttcaaggtaagccgtaccagcaaaatcagagcctagactttcagataccgaattataaataactcctttagcttctatattaaaatgttttaaccattcaacgcttctcttggataccgcataaaaatctggacgataatgcttaacacgcgctgtgagaagatgttcatagatagctccaaagaaatctaaaaaacgattattgacagaaaaatgacttgacccatggtctaaaacaatactaggtaaatggtgattctttgcaaaagatagcccttctagcgttgttaactgaaaacgtgtattacaaatcacaaaatcaatattttcatctgaaacatatttcatcagcgtgttgtattctcgatttttgttaataataggatagcgctgcttgacaatatttttggtcggtaaacggtaaatttttctacccttgtcttcatctataatcggtaaatcaccatgattagttgttacaataacaacacggtagccacgcttaaccaaatctgctgtcattttatctgtataacgttcaatacctccgaggaagggtagataatatcctgagaaaacagcaactgtttttaccttattttccatatttatccactttcatcaataagccatcttttaagcctttaatcatagcaactatttttttgctcttttgctcttctgctaccaacactcgaacaaattcatttcgcataaatactaaatatttgtatcgcttcttcttaccatatttttttataatatagatcgcattgcgtatcatgtaatattttcgaaatggtgaatgattcaatacatgaaaaacatggccaaattttttaactcgtgaagagtgtccaatttcgtgtaacagaccaataaaattaacctgataagtcttatatcccatctctgacagacgataattcatttcagagtcaacaaaatcaataaacatctcttctgcaaagccagatgtttcttcgaaaacgctcgttttcattaaagcagccgaagtaatacactcttcaatttctttatagtcaaattcttgcatcactaaattttcacggttcatatcttgatacaaacaagataacataccgaccttaggtaaatgaaggtaattttcataattatctatcaaatcacctaggacaaccgaatcttgatctaaagtcaagaaccaatcaaattcttgtgctactgcaaattgaccgatacagttcaaagcatatgcaattcctttattttctgttaaataatcaacagttaggtgcccctcttcattataatcggctactaattgagaaatttcttccttatttttcgagccattatctacgatgtagatatggcttacttgaggataaattgctcgaatgttctgatctaagcgttcaatattggggttaaaggtgacaatacccgctaaatatttcatgttctatgctcttttctaaaatctctaaataactgaatgactggtgctttggttataaaaacgataccgacatagatagttactgctactaaactttgaatgacataatttaccaatgatactgacatttgagtattgatataatagagtacagctccactaagagtagcagcaattaaatagcgcagcattcctcttgttaattctttaaaagtaaatacatctcttaaagagatagcttgatatagggagacaataaattcagtaataactgtagagataatagctcccatagcacctaaaattggtattaaaagtatattaagcacaacatttgccacaagtccaataactgcagacattgtgtaagcttttgtacgtcttgaagccagtagatactgtgtccctaaagcgttaccataagaaatgcaaatgatcatcaaagactcaacaccgacaacttcataccctttcccaaaaaagaagacgcaaannnnnnnnnnnnnnnnnnnnnnnnnnnnnnnnnnn

SEQ ID NO: 481 - DNA, 14000 bp, Streptococcus agalactiae
ggccttgttccgatgttgattccgataactcctggctcattaatagcctgttcgtaacgctctttaattatctctaacttagcatgggtattggtaaaattttgaaaatagactaagtatttattaacctcaggccactttctatgcatgaaatcaatttctttatagaattgttcacgaataggagcttctggagcaactatagcatcccctgaaccagaaactgtgcaaaaagtgcaccctcctctagcaactgttccgtctctgttaggacagtcaaaaccagcatctataggtaatttaaatattttttctccaaagagttctcgataataatcattaatcgcacgataacgttttttcataggataattgtatcacaattttaactaaaataacctcactactacaataaaactaaaaaagattggaacgtcagttagtcccaatcttttatttacttcactttctttaaccaatccttggctaaaaagatatacgcagttagattcaaaataccataagcaagtataaaaccagctaaaacatctgtcggaaaatgaacccctaggtaaatacgagataacccaattaaaaaaatgagcaaacccaaagtaccttggcacaacagtttccatatactcttaggcatatagtactgcaataaaataataatactcccaaatatcataaatgttcccatcgagtgcccactgggaaacgaatagccacctgcaaatactaaatgggttaaagttggtcttactctttgaaaaataagttttaaagaaagtatacatataccagagataatagcatttactgcgataaatctagcttgaggataccacttcttaaggtaacagaaagtgacgctcataatcgcaatagctatctggcttacagtattaccaatcacagtgattaacttgaaaaatcttgtagaaagatttggcaactgtcctctaacactttcttgaatagtttggtcaaatgaaattacagtgtcgggccaatatttgatgaccaatcctaaactgaaaaataagataatagcaataaatgcttgaataagtttactattttgacgagataacattagtctttttatatctttctaatattggcaaacaagccacgtaagttagatagaaaacaatcgaaattaaaattccctcaacgatattaaatggaataaccattgttaaaaggtaattgcctacaccaataaatgttctgatatcaaagttagcaaatatagcatacaaaggaatcgcaaagacatagttgagagctaccatagatacggtcaagctaactgtaccaaatagactagctttaataaaatcttttgcactctctctatttttccagaaaatagcgaaacttgctaaaaataaagctagagcaaccatattcatcggtaaaccaataaacgtttctggaccacgattagcaagtataacttttaaaagtgatcttaataagagtacaccataacttgatttcaaatcaaataaaataaaagcaactaacatcggaaggattgaaaaatcaacctttaaaaattctgctcctggtattaatggaaatgaaaccatcatcaatacaaaagataaggcagaaagaatggcgattgtcaccattttacgtgtatttgtcataaaaaaattcctccaatttaaataaattgaaagaagctccaaaggtaagcgtatgtacgcgaaaaaacctttgtcttctcccatccagactttactgtcggttgtggaatctcaccacatcagctttcgctcgcggactgatgcttcacaactgacaaataagttggaagcgattaccgccggtcgggaattacaccctgccctgaagacacctatagcataacaaaaaaaacttgcaattgcaagttttttaattactaattagtagtagtgattaaaaatcatattaataccaaattactatactgtatcgtttctttcagatttgctatttttagtttttcttaaaaagataaacaaaattcccaaaataatacaaccaagaattgtcagtcctccaccaataatcattcctgttttaggaagaaatgattgtggaaaaagcggttgtgatggtttaggatttgttggtggaggagtttctttttcgttttctacctctacttcctgtgttttattagcaactacagcaactacagcatccttcatagatatacggtaaccagttagtgcttttgcttctcgaaaaatatacttaccaggtaataaaccttcaacctcaatttctcccttatcatcagttactaatgaagtaatcccatcttgatcggtcgtaaatcgtccatttttaaagcgaactggctgattctggttatcgtataatacaaatattactccggatagccttttctttatctttccttcttttgtatatttaataagttttaatcggcctgtttcaacttttcgcttaggatttatctgtaattgatttgataacttatcatctggtaattcaatataaaaaggtactattgttgaaacgctttgatcagctttataagcacgaccaaagtacgaaccatttgggagtgctatctttgtctgaccattagtatcagtaggagaagtcaagatactcttatacttctggttcaattcgctatctgtcatttggctcaataaatcaacttttaagttgtcagtcacagtccataaacgataagaaatcccctcctctgtagtatttggctgaagtcctatctgtgtgattgttagttgattaggggtatcagcatttacactggctaccgaaaaaaacgctaattgtaccaatcctaaaaagcaacatagtagaagtcctaaactttttctaatctttttcatttttgatttccctttctctttctctctttaaattttcgttttaaatataatagtaaagcgactaatataagaataactaggattgataagaggaaataaagtttatagtgtgtttgcaattctttcattaaatagttcttttctttaacaggaggtacatacttgattcgatgccctctaactagtaaacgatgtgaattaatcgaataaggtgtacatgttagcaaagtcgcataatccttacctttaacaaccaataatttagaaaaattatctggctttacaacacttatttgatcaaccttataggctaaaacttctttgatattatgaatataaaaaatttttccttttttaagtttatctaaatctgtaaataacttagctttaggtaagccgcgatgagctgtgataacagtatgtgaactttttccaccaattggcaaggaggttccttcaaggtgtcctgctcctttttcaagaacactactggtagtccccgcatagataggtaatttttgcttgatagacggtatatcaatatatccaatcatttcagcaatctcaagcatgtgggcgtattcagcaataccttttttttctttttcagtatagggatctgataggcggcttgggtccagtgttctattataagcttttgctaactcaaatcgtctattaatctctttagtatttaatttttgggtttgattatcaaagttagttacttgattattagctttaatattatagtaccaatttgaaataaaaggatatgaggttatcaaaagaccaactaagaacaatagtatcaagcctacattcatccatcgatttaaaacgaccgatttcttaaggtttttctgaaattttcctcccattatgattcaattccttttctaacacttgctaaacgatttttttgacgttgacgttttattaaccaaagtaaccaagcaataataactaaagatatatagaatagatatctataaatcgtgtttaaatgaccgtcttttattaatttttcatcaataggacctttataagggatacgatgtccccttactaaaagtctgtgtgtattgatcataatcggggtgcaagtcaataaggttgcataatcatgtccaggaacaaccaacaaatctgaaaagttatcgggtgtaacgacttttatctgatctacttgatatgctatcgtttcttttatgttttgaatataaaacttatctcctttttttaactttttaaggttagaaaagagttctttatctggaattcctgaatgcgctgttataacagtatgtgtactattgcccccaattggaagagaggtaccttctaaatgccctgctcctttagatagaacttcttgacttgaacctgcaaatatagggagtttttgacctatcttaggaactgaaattgttccgattttttcacttacctctaacatacgggcgtactctgctacccccttttgaattcgttttttctcataaggatcttcaagatggacattatttaaagaatcattataagcttgtgctagagccatacgtcgattgatttctttctgactaagttttttagcagctctctcaaaatcctgtgtttgattattagattctatcgtatagtaaaaacgtgataccactggatacaataaaatagatagacctattagaaaaagaatgataaaaggaagatttgacttcttctttttttttgtttttttgatgatttttttagtcttcacgtcatctcctagataatggctcttgcttatgatctaagagtacttctactgaaatacccttagatcataagcacagctttaactgcgcttatacatcatcaaagactagccttaagcttcctttgattggcgtcttttcatgataactactgctccaagcataatgcttaaaccaataattgtgaaaagaattgtaccaataccacctgtttgtgggattgttacctttttattttctacacgtgtcgcatctttttggttgctgttagcaacgtagtcaatgttaccacctgttatgtatgacccttgattaactacaaacttaatattacctgccaacttagcaaatcctgctggagcaagtgtttcttcaaggttgtaagtaccgtctgcaagacctgtaacttcaaattgaccttgatcgtttgaagtgtaggtaatggctctagccttatctgttatccactcataagctgtacgagcctcaatgaaggctgcatcgtaatctgcttgtttagttttgataagttcttttgcagtaattcctttttcacctttttggtctgttgcagacaacttgttataagcagcgatagcttcatctaaagctattttcttagcagctaaagttttttgaccttctgattgatctgctttaagagcaaggtatttacctgctgagtttttcacaacgaattgtgcaccagccaaacggtcaccttgttcattagttttgacaaatttcttaccatgagtttcaacttttggttcagttgggttcaatggtgttgggttatcagaatctttggtattggtaatggttactttaccattttctagatttattgcacttccgtaaccagaaacacgttctgagatcatgtatgatttgttttctagaccagtgaatttacccgagaagttaccagatacttcaaatttgataccatttccaaggtcgattgtacctttagatgtttttgtcaatgatactgaagcaacagttttatctttatctttcaatgtgtaaacaacgtttacaccatcaggtgcaattccgtcagaccaagttttagcaactgttacttcaccctttgaaggtgtaacaggaagttcagtcaagtctttacctggtttgttaccatacgacaatttgatatcattggattctggattatcaataattgcttgaccattaacagtagcactataagtcaatgtaaattcaatatcagctgttttagctgctttttccaatttgcccaatccatcagctgtgaattttaatgtgaaaccacgggcatcaatgctaagttcatagtctgtatccttagcaaaagtttctgtagttcctgaagctttaaggctaacagttgaacccattgtcaaaccatttgacattatatctgtccaaaccaagttttcgtatttagaacctttgtgaatttttgttttaacttcataaggaacaactttaccgatttcagcagtagcagttgctttgtcacgtgcataattaccataatttgcgccagctgtcaaaagtctattaacatctgtcaatgctgtcaaatcgtttgttttagcaaagtttttatcaatttctggtttttcttcagtgttctttggataaacatgggcatcagcaacaacaccatcttcatttaccaatggaagagtgatgttaactggaaccgcttttgaagcagccaggagggaaccattattgttgtaagtagattttgatttaacttcaacaattttaaactcgcctttcaatcctttggtgttgaaaacaagtccagtatctccctctggtgtcaatccagacacggcctcatcaatatttactgttatttcaggagtaccatctttattaattaaggctggtgttaatttgttaccttcttttgccttaacatattgcactttaccacttttatcttctttcaaagctaaagcaaagaacgcaccttcgatttctttagatccctcgccaaagtaaccagcaaggtcagaaatagctccacctttgtagtcttttccgttaagacctgtagttcctgggaagttacttttgttaagatttgattcggtttgcaaaatcttgtgcaaagtcactgtattagttgttgcttcatccgcaaacgctggtgcaactgagagcaatgacgttaaagtcagtaacaatgccgagaacattgcaaaatatttgttgattcttttcatttctatctccttcttattttagttaatcaacatgattaataatatgcggattttaatacaccgcagcaccactcccttcaagtcatggaattttagttaattaattaagaatactaaagcgcataatttttaatcttttttgatggacatatcactagatttcttataccttttccaaatataaattccacctgcaatagacatcatagctccacctattaaaatgaaagatagaattcctttcccacctgtcataggaataattccttttggtggaatatgcgtgttggtaattaaatgcttgtcaccttcctcatgatattcagaaatctgtttattaacagctattatattttttatcgatcctttaaccacttcaaaagttaaaattggtttattagtaattttttgataatcctccggcgaaactgcttctattaactgatatttgccatctttcaaatctttgtaagaaattttgccgttttctcccgtcactacttttgaattattattttttattggtaaataaagtttataatcttcattaaattcttgaagttcaaacgtagctcctttgagaagcaacttattattatctttatcaacttttataaattcaatttcacctaacttcttctcgtttttaatcgttattgtaggatattctctcacatcacgaattttagggattggaaaatctctaagtgtattaggatcctctgacttaggattcaatgttgttctaccattagtgtcatagaatttgttacttataaaactgtcatctagtttcacatcatatgtgagtgttactttttgaccttctcctaaattcaaacctctaacatagagtttatttccgatgtattctaatttaacccccttaagtattccaccatcattattaggcccaccagttgcaataccatccttcattacacttccatcatttccctgtaaagtataatcacttggctgtaatgtttgtccattaccaagctgtaaattgattttatcacccataggatcttcgatagttccattaacaattgagttttcttttgttaaaatcgtttcaaattgttgctgaattttagataaaatttcattgttagatgtatcggctgaagttacgataggggtgtagtactcaggtttggaagagaacgacctcattagttctgtgatttctccatctgaaagtttaaaagcttcctctttcaatttttgaaaagtaccatcttgatttttcttatactcctcattataaacttgtctaaaaccagatatatcgataccaaaattaaaaatgtcataatttttctgttttaaactatttatataaagtttggttggtgttccatgttctttcactggtccatttcgataaattgtacctttagggtaattaagatttaaatctaaataatgaagtttttgtaagtttccagagattatctgtgtttgataactatctaagggaaacaaaaagtaactctccccatttccttttatatcctcgggcttatcagtaagtagaaaattacttttatttagatatccattttttttcatttgttcaaattggctttcatatgatgcacccagtttaaaattattaatagcatatgatctcgtaggaacaccatcagttacatgaacaataattttttgactatttcgatttacttgactcaaaatatcatctgcctccatgaaggctttcatagtaaatgtttctcctactttactaagatagtactccttttgttgctctggagttaatccattggtagtagatccccacttagctttaggagcttctgtcggaatcctttttataatctcttcagcattatttgttaattgtttatgactataattctctgtctgaattgtgaacttagtttgaaggccataatatttatcatcttctttaaatccttttacgacatctacactcctaccatcaaaaatatctgaaccataggtaactaatgcaaccctattatcactgtttgctcctaaaatatcttttactgcggtcccaagagcttcggcagctttcttggctttattatgcctttgaaaatttgggccatcgttattcattgagttagaattatcgagtacgaagacaacatctaacggcttttgtttgtccactggttttactatggtttttccactgacagttaactcaattttatatttattatgagctaaatcacctacttctgaaatacgtttagataatgttccctctggaatttctcttatatgctcaccttcacttgaatatgggttaactgcttttgcctctgactttccatttggaactgaacctttaacatgctcaagtttataagattcctttgtatcttcataaattcctgtggggggatactgcttatctagttcttcctgattttgtccaattgtggaatttttatcaccactattttgtatcgtagtttttccattactctcaaccttaacttgccaagtctggttagtctttttataaccttcgggcgctgtttcttctgataaagtataatctccaggtatgagattatcaaaagtagcttcacctgttagctcagcagttactttttctattttactttctggatgagcagtagtttttaaaacaaaggtagcttttgaaagtggtttgttctggtcatctgtctttttaacaactaactttcctttagcaccattttccggtacggtactttcccctaaaacattggtattaagcggtatttgcgacaaacaaaaaagacttaacgtcaatattttagaaaatttttggtattttctcattttacaactcctattgtgccgaaatgtcgtttctaaatctaagatcagatacagaatatcctagaatatacaaactatcacttattatgatatcaataatttcttattataaggtatggaattttaatgttttttcccaatttttgaataatttttctttttatttgataatcttattttttattatcttagaaatatttcaatgagcttaagtagttgatttttctttttttatgttttaaaatattgcttaaaaataatgtttgagagagtttactgaattgattgaaaattatttagaaaaagacatccttaatcaaataaaacttctaactttatgctatgattactacccttccattactctagacaaatcatgtcatcaacttggtttatctgaactacttattaggaaatattgtcatgatttaacaactttatttaacagtcaactctctctgaatatcgaaaagagtacaatagtctaccaatctaatggtgtaactagagaacaagctttcaaatatatttatcatcaatcacacgttttacaacttttaaaatttttgatcacgaatgattcaggcaggttacctttaacttactttagtgaaaaatttggactatcttgtgcaactgcttatcgcatacgaaaacatattagtccattactagaaaaacttggatttcagattgtcaaaaatactattaccggtgacgagtatcgaattcgctatttaatcgcatttttaaatgctcaatttggtatagaagtttatcccatgtctaagatggataaattgctcatcaaacgattgttattagaacactcaactacttttactgcttctcattacttcccaaatacatttattttctttgatacattgttgtctctatcatggaaacgtattaattataatgtagttgtcccttactcatcccttttcactgaactacaaaatatatttatctatgatacattacaatattgtgtcaaaaatgttattatagattcctttaaaattaatttaaaaaaagacgatatagactatatttttcttgcttaccttacttcccataactctttttctaatccaaattggactgagaagcgtatcgataatgtaatagctattttcgaaaattatcccaaattccaaaaattattacagccactcaaagatgctcttcccttatctggctcctatcatgatgagttggtaaaagttgctatctttttttccgaacatttattttaggattaaatcaattaatccctgaaacaatttcatttccttcatggaactatcatagacatgataaattaactactattctccgaccgataattacaaattggttaagtaaaattggagaatacacgtttaaagaacaacattttcttctcctttgtactcatctagaaagaatcatcaaaaatcatattcctccgatacagatagccgtactaactacagactttattaataaccaaattttaacagaatgcttattacagagattttcttctaaaaagattcatttccacccttactatttattaactgatgatctttccaatattactaatcttaatccagacattattattaccaataaaaagctttctccctttatcaaacatgagatttcttcagagagtttaattacatatattgatctgattaatacttcagaccaaatcaatcaaatccaaaaaattatttcatcaatacaggaagaaaaatattgcaaactttttgcaaaaactaatgaaataactaatcgtagctcctataactcttaaaaattaacattaaaaagctagagcattgtgtaatgctctagctttttaatgttaatttttttgaataatataatccaacttttcaactgttttttcccatgtgaaatgttctttaattcttttagcaatattctgttgtagtttctctcttaatgccttatcttttactaataaatcaagagattcatggagtgactgagtattttcttccatgatgattcctaactcagggctatcaataacttcaactgttccaccgcgatctgttgcaataatagcacttgaaagtagaccagcttctaaaatagaggttggtaatccctctggatacattgaagggtaaacaaagatatcagtctgtgccattaaagacatagtctgttcaaagtttaatttccccaaaaagttaatctgtttggactgatatttctctttcaaatgtgctaattcaggtccgtctcctgcaatctgtaaataaacattttcagagtactgtgacatcgaaaatgcttctaagagcaattcaatgcctttttctttaataattctaccagcataagtgatgaaaatatcatcagcagatttttcaaggtaagccgtaccagcaaaatcagagcctagactttcagataccgaattataaataactcctttagcttctatattaaaatgttttaaccattcaacgcttctcttggataccgcataaaaatctggacgataatgcttaacacgcgctgtgagaagatgttcatagatagctccaaagaaatctaaaaaacgattattgacagaaaaatgacttgacccatggtctaaaacaatactaggtaaatggtgattctttgcaaaagatagcccttctagcgttgttaactgaaaacgtgtattacaaatcacaaaatcaatattttcatctgaaacatatttcatcagcgtgttgtattctcgatttttgttaataataggatagcgctgcttgacaatatttttggtcggtaaacggtaaatttttctacccttgtcttcatctataatcggtaaatcaccatgattagttgttacaataacaacacggtagccacgcttaaccaaatctgctgtcattttatctgtataacgttcaatacctccgaggaagggtagataatatcctgagaaaacagcaactgtttttaccttattttccatatttatccactttcatcaataagccatcttttaagcctttaatcatagcaactatttttttgctcttttgctcttctgctaccaacactcgaacaaattcatttcgcataaatactaaatatttgtatcgcttcttcttaccatatttttttataatatagatcgcattgcgtatcatgtaatattttcgaaatggtgaatgattcaatacatgaaaaacatggccaaattttttaactcgtgaagagtgtccaatttcgtgtaacagaccaataaaattaacctgataagtcttatatcccatctctgacagacgataattcatttcagagtcaacaaaatcaataaacatctcttctgcaaagccagatgtttcttcgaaaacgctcgttttcattaaagcagccgaagtaatacactcttcaatttctttatagtcaaattcttgcatcactaaattttcacggttcatatcttgatacaaacaagataacataccgaccttaggtaaatgaaggtaattttcataattatctatcaaatcacctaggacaaccgaatcttgatctaaagtcaagaaccaatcaaattcttgtgctactgcaaattgaccgatacagttcaaagcatatgcaatccctttattttctgttaaataatcaacagttaggtgcccctcttcattataatcggctactaattgagaaatttcttccttatttttcgagccattatctacgatatagatgtggcttacttgaggataaattgctcgaatgttctgatctaagcgttcaatattggggttaaaggtgacaatacccgctaaatatttcatgttctatgctcttttctaaaatctctaaataactgaatgactggtgctttggttataaaaacgataccgacatagatagttactgctactaaactttgaatgacataatttaccaatgatactgacatttgagtattgatataatagagtacagctccactaagagtagcagcaattaaatagcgcagcattcctcttgttaattctttaaaagtaaatacatctcttaaagagatagcttgatatagggagacaataaattcagtaataactgtagagataatagctcccatagcacctaaaattggtattaaaagtatattaagcacaacatttgccacaagtccaataactgcagacattgtgtaagcttttgtacgtcttgaagccagtagatactgtgtccctaaagcgttaccataagaaatgcaaatgatcatcaaa

SEQ ID NO: 482 - DNA, 14000 bp, Streptococcus agalactiae
ggccttgttccgatgttgattccgataactcctggctcattaatagcctgttcgtaacgctctttaattatctctaacttagcatgggtattggtaaaattttgaaaatagactaagtatttattaacctcaggccactttctatgcatgaaatcaatttctttatagaattgttcacgaataggagcttctggagcaactatagcatcccctgaaccagaaactgtgcaaaaagtgcaccctcctctagcaactgttccgtctctgttaggacagtcaaaaccagcatctataggtaatttaaatattttttctccaaagagttctcgataataatcattaatcgcacgataacgttttttcataggataattgtatcacaattttaactaaaataacctcactactacaataaaactaaaaaagattggaacgtcagttagtcccaatcttttatttacttcactttctttaaccaatccttggctaaaaagatatacgcagttagattcaaaataccataagcaagtataaaaccagctaaaacatctgtcggaaaatgaacccctaggtaaatacgagataacccaattaaaaaaatgagcaaacccaaagtaccttggcacaacagtttccatatactcttaggcatatagtactgcaataaaataataatactcccaaatatcataaatgttcccatcgagtgcccactgggaaacgaatagccacctgcaaatactaaatgggttaaagttggtcttactctttgaaaaataagttttaaagaaagtatacatataccagagataatagcatttactgcgataaatctagcttgaggataccacttcttaaggtaacagaaagtgacgctcataatcgcaatagctatctggcttacagtattaccaatcacagtgattaacttgaaaaatcttgtagaaagatttggcaactgtcctctaacactttcttgaatagtttggtcaaatgaaattacagtgtcgggccaatatttgatgaccaatcctaaactgaaaaataagataatagcaataaatgcttgaataagtttactattttgacgagataacattagtctttttatatctttctaatattggcaaacaagccacgtaagttagatagaaaacaatcgaaattaaaattccctcaacgatattaaatggaataaccattgttaaaaggtaattgcctacaccaataaatgttctgatatcaaagttagcaaatatagcatacaaaggaatcgcaaagacatagttgagagctaccatagatacggtcaagctaactgtaccaaatagactagctttaataaaatcttttgcactctctctatttttccagaaaatagcgaaacttgctaaaaataaagctagagcaaccatattcatcggtaaaccaataaacgtttctggaccacgattagcaagtataacttttaaaagtgatcttaataagagtacaccataacttgatttcaaatcaaataaaataaaagcaactaacatcggaaggattgaaaaatcaacctttaaaaattctgctcctggtattaatggaaatgaaaccatcatcaatacaaaagataaggcagaaagaatggcgattgtcaccattttacgtgtatttgtcataaaaaaattcctccaatttaaataaattgaaagaagctccaaaggtaagcgtatgtacgcgaaaaaacctttgtcttctcccatccagactttactgtcggttgtggaatctcaccacatcagctttcgctcgcggactgatgcttcacaactgacaaataagttggaagcgattaccgccggtcgggaattacaccctgccctgaagacacctatagcataacaaaaaaaacttgcaattgcaagttttttaattactaattagtagtagtgattaaaaatcatattaataccaaattactatactgtatcgtttctttcagatttgctatttttagtttttcttaaaaagataaacaaaattcccaaaataatacaaccaagaattgtcagtcctccaccaataatcattcctgttttaggaagaaatgattgtggaaaaagcggttgtgatggtttaggatttgttggtggaggagtttctttttcgttttctacctctacttcctgtgttttattagcaactacagcaactacagcatccttcatagatatacggtaaccagttagtgcttttgcttctcgaaaaatatacttaccaggtaataaaccttcaacctcaatttctcccttatcatcagttactaatgaagtaatcccatcttgatcggtcgtaaatcgtccatttttaaagcgaactggctgattctggttatcgtataatacaaatattactccggatagccttttctttatctttccttcttttgtatatttaataagttttaatcggcctgtttcaacttttcgcttaggatttatctgtaattgatttgataacttatcatctggtaattcaatataaaaaggtactattgttgaaacgctttgatcagctttataagcacgaccaaagtacgaaccatttgggagtgctatctttgtctgaccattagtatcagtaggagaagtcaagatactcttatacttctggttcaattcgctatctgtcatttggctcaataaatcaacttttaagttgtcagtcacagtccataaacgataagaaatcccctcctctgtagtatttggctgaagtcctatctgtgtgattgttagttgattaggggtatcagcatttacactggctaccgaaaaaaacgctaattgtaccaatcctaaaaagcaacatagtagaagtcctaaactttttctaatctttttcatttttgatttccctttctctttctctctttaaattttcgttttaaatataatagtaaagcgactaatataagaataactaggattgataagaggaaataaagtttatagtgtgtttgcaattctttcattaaatagttcttttctttaacaggaggtacatacttgattcgatgccctctaactagtaaacgatgtgaattaatcgaataaggtgtacatgttagcaaagtcgcataatccttacctttaacaaccaataatttagaaaaattatctggctttacaacacttatttgatcaaccttataggctaaaacttctttgatattatgaatataaaaaatttttccttttttaagtttatctaaatctgtaaataacttagctttaggtaagccgcgatgagctgtgataacagtatgtgaactttttccaccaattggcaaggaggttccttcaaggtgtcctgctcctttttcaagaacactactggtagtccccgcatagataggtaatttttgcttgatagacggtatatcaatatatccaatcatttcagcaatctcaagcatgtgggcgtattcagcaataccttttttttctttttcagtatagggatctgataggcggcttgggtccagtgttctattataagcttttgctaactcaaatcgtctattaatctctttagtatttaatttttgggtttgattatcaaagttagttacttgattattagctttaatattatagtaccaatttgaaataaaaggatatgaggttatcaaaagaccaactaagaacaatagtatcaagcctacattcatccatcgatttaaaacgaccgatttcttaaggtttttctgaaattttcctcccattatgattcaattccttttctaacacttgctaaacgatttttttgacgttgacgttttattaaccaaagtaaccaagcaataataactaaagatatatagaatagatatctataaatcgtgtttaaatgaccgtcttttattaatttttcatcaataggacctttataagggatacgatgtccccttactaaaagtctgtgtgtattgatcataatcggggtgcaagtcaataaggttgcataatcatgtccaggaacaaccaacaaatctgaaaagttatcgggtgtaacgacttttatctgatctacttgatatgctatcgtttcttttatgttttgaatataaaacttatctcctttttttaactttttaaggttagaaaagagttctttatctggaattcctgaatgcgctgttataacagtatgtgtactattgcccccaattggaagagaggtaccttctaaatgccctgctcctttagatagaacttcttgacttgaacctgcaaatatagggagtttttgacctatcttaggaactgaaattgttccgattttttcacttacctctaacatacgggcgtactctgctacccccttttgaattcgttttttctcataaggatcttcaagatggacattatttaaagaatcattataagcttgtgctagagccatacgtcgattgatttctttctgactaagttttttagcagctctctcaaaatcctgtgtttgattattagattctatcgtatagtaaaaacgtgataccactggatacaataaaatagatagacctattagaaaaagaatgataaaaggaagatttgacttcttctttttttttgtttttttgatgatttttttagtcttcacgtcatctcctagataatggctcttgcttatgatctaagagtacttctactgaaatacccttagatcataagcacagctttaactgcgcttatacatcatcaaagactagccttaagcttcctttgattggcgtcttttcatgataactactgctccaagcataatgcttaaaccaataattgtgaaaagaattgtaccaataccacctgtttgtgggattgttacctttttattttctacacgtgtcgcatctttttggttgctgttagcaacgtagtcaatgttaccacctgttatgtatgacccttgattaactacaaacttaatattacctgccaacttagcaaatcctgctggagcaagtgtttcttcaaggttgtaagtaccgtctgcaagacctgtaacttcaaattgaccttgatcgtttgaagtgtaggtaatggctctagccttatctgttatccactcataagctgtacgagcctcaatgaaggctgcatcgtaatctgcttgtttagttttgataagttcttttgcagtaattcctttttcacctttttggtctgttgcagacaacttgttataagcagcgatagcttcatctaaagctattttcttagcagctaaagttttttgaccttctgattgatctgctttaagagcaaggtatttacctgctgagtttttcacaacgaattgtgcaccagccaaacggtcaccttgttcattagttttgacaaatttcttaccatgagtttcaacttttggttcagttgggttcaatggtgttgggttatcagaatctttggtattggtaatggttactttaccattttctagatttattgcacttccgtaaccagaaacacgttctgagatcatgtatgatttgttttctagaccagtgaatttacccgagaagttaccagatacttcaaatttgataccatttccaaggtcgattgtacctttagatgtttttgtcaatgatactgaagcaacagttttatctttatctttcaatgtgtaaacaacgtttacaccatcaggtgcaattccgtcagaccaagttttagcaactgttacttcaccctttgaaggtgtaacaggaagttcagtcaagtctttacctggtttgttaccatacgacaatttgatatcattggattctggattatcaataattgcttgaccattaacagtagcactataagtcaatgtaaattcaatatcagctgttttagctgctttttccaatttgcccaatccatcagctgtgaattttaatgtgaaaccacgggcatcaatgctaagttcatagtctgtatccttagcaaaagtttctgtagttcctgaagctttaaggctaacagttgaacccattgtcaaaccatttgacattatatctgtccaaaccaagttttcgtatttagaacctttgtgaatttttgttttaacttcataaggaacaactttaccgatttcagcagtagcagttgctttgtcacgtgcataattaccataatttgcgccagctgtcaaaagtctattaacatctgtcaatgctgtcaaatcgtttgttttagcaaagtttttatcaatttctggtttttcttcagtgttctttggataaacatgggcatcagcaacaacaccatcttcatttaccaatggaagagtgatgttaactggaaccgcttttgaagcagccaggagggaaccattattgttgtaagtagattttgatttaacttcaacaattttaaactcgcctttcaatcctttggtgttgaaaacaagtccagtatctccctctggtgtcaatccagacacggcctcatcaatatttactgttatttcaggagtaccatctttattaattaaggctggtgttaatttgttaccttcttttgccttaacatattgcactttaccacttttatcttctttcaaagctaaagcaaagaacgcaccttcgatttctttagatccctcgccaaagtaaccagcaaggtcagaaatagctccacctttgtagtcttttccgttaagacctgtagttcctgggaagttacttttgttaagatttgattcggtttgcaaaatcttgtgcaaagtcactgtattagttgttgcttcatccgcaaacgctggtgcaactgagagcaatgacgttaaagtcagtaacaatgccgagaacattgcaaaatatttgttgattcttttcatttctatctccttcttattttagttaatcaacatgattaataatatgcggattttaatacaccgcagcaccactcccttcaagtcatggaattttagttaattaattaagaatactaaagcgcataatttttaatcttttttgatggacatatcactagatttcttataccttttccaaatataaattccacctgcaatagacatcatagctccacctattaaaatgaaagatagaattcctttcccacctgtcataggaataattccttttggtggaatatgcgtgttggtaattaaatgcttgtcaccttcctcatgatattcagaaatctgtttattaacagctattatattttttatcgatcctttaaccacttcaaaagttaaaattggtttattagtaattttttgataatcctccggcgaaactgcttctattaactgatatttgccatctttcaaatctttgtaagaaattttgccgttttctcccgtcactacttttgaattattattttttattggtaaataaagtttataatcttcattaaattcttgaagttcaaacgtagctcctttgagaagcaatttattattatctttatcaacttttataaattcaatttcacctaacttcttctcgtttttaatcgttattgtaggatattctctcacatcacgaattttagggattggaaaatctctaagtgtattaggatcctctgacttaggattcaatgttgttctaccattagtgtcatagaatttgttacttataaaactgtcatctagtttcacatcatatgtgagtgttactttttgaccttctcctaaattcaaacctctaacatagagtttatttccgatgtattctaatttaacccccttaagtattccaccatcattattgggcccaccagttgcaataccatccttcattacacttccatcatttccctgtaaagtataatcacttggctgtaatgtttgtccattaccaagctgtaaattgattttatcacccataggatcttcgatagttccattaacaattgagttttcttttgttaaaatcgtttcaaattgttgctgaattttagataaaatttcattgttagatgtatcggctgaagttacgataggggtgtagtactcaggtttggaagagaacgacctcattagttctgtgatttctccatctgaaagtttaaaagcttcctctttcaatttttgaaaagtaccatcttgatttttcttatactcctcattataaacttgtctaaaaccagatatatcgataccaaaattaaaaatgtcataatttttctgttttaaactatttatataaagtttggttggtgttccatgttctttcactggtccatttcgataaattgtacctttagggtaattaagatttaaatctaaataatgaagtttttgtaagtttccagagattatctgtgtttgataactatctaagggaaacaaaaagtaactctccccatttccttttatatcctcgggcttatcagtaagtagaaaattacttttatttagatatccattttttttcatttgttcaaattggctttcatatgatgcacccagtttaaaattattaatagcatatgatctcgtaggaacaccatcagttacatgaacaataattttttgactatttcgatttacttgactcaaaatatcatctgcctccatgaaggctttcatagtaaatgtttctcctactttactaagatagtactccttttgttgctctggagttaatccataggtagtagatccccacttagctttaggagcttctgtcggaatcctttttataatctcttcagcattatttgttaattgtttatgactataattctctgtctgaattgtgaacttagtttgaaggccataatatttatcatcttctttaaatccttttacgacatctacactcctaccatcaaaaatatctgaaccataggtaactaatgcaaccctattatcactgtttgctcctaaaatatcttttactgcggtcccaagagcttcggcagctttcttggctttattatgcctttgaaaatttgggccatcgttattcattgagttagaattatcgagtacgaagacaacatctaacggcttttgtttgtccactggttttactatggtttttccactgacagttaactcaattttatatttattatgagctaaatcacctacttctgaaatacgtttagataatgttccctctggaatttctcttatatgctcaccttcacttgaatatgggttaactgcttttgcctctgactttccatttggaactgaacctttaacatgctcaagtttataagattcctttgtatcttcataaattcctgtggggggatactgcttatctagttcttcctgattttgtccaattgtggaatttttatcaccactattttgtatcgtagtttttccattactctcaaccttaacttgccaagtctggttagtctttttataaccttcgggcgctgtttcttctgataaagtataatctccaggtatgagattatcaaaagtagcttcacctgttagctcagcagttactttttctattttactttctggatgagcagtagtttttaaaacaaaggtagcttttgaaagtggtttgttctggtcatctgtctttttaacaactaactttcctttagcaccattttccggtacggtactttcccctaaaacattggtattaagcggtatttgcgacaaacaaaaaagacttaacgtcaatattttagaaaatttttggtattttctcattttacaactcctattgtgccgaaatgtcgtttctaaatctaagatcagatacagaatatcctagaatatacaaactatcacttattatgatatcaataatttcttattataaggtatggaattttaatgttttttcccaatttttgaataatttttctttttatttgataatcttattttttattatcttagaaatatttcaatgagcttaagtagttgatttttctttttttatgttttaaaatattgcttaaaaataatgtttgagagagtttactgaattgattgaaaattatttagaaaaagacatccttaatcaaataaaacttctaactttatgctatgattactacccttccattactctagacaaatcatgtcatcaacttggtttatctgaactacttattaggaaatattgtcatgatttaacaactttatttaacagtcaactctctctgaatatcgaaaagagtacaatagtctaccaatctaatggtgtaactagagaacaagctttcaaatatatttatcatcaatcacacgttttacaacttttaaaatttttgatcacgaatgattcaggcaggttacctttaacttactttagtgaaaaatttggactatcttgtgcaactgcttatcgcatatgaaaacatattagtccattactagaaaaacttggatttcagattgtcaaaaatactattaccggtgacgagtatcgaattcgctatttaatcgcatttttaaatgctcaatttggtatagaagtttatcccatgtctaagatggataaattgctcatcaaacgattgttattagaacactcaactacttttactgcttctcattacttcccaaatacattgattttctttgatacattgttgtctctatcatggaaacgtattaattataatgtagttgtcccttactcatcccttttcactgaactacaaaatatatttatctatgatacattacaatattgtgtcaaaaatgttattatagattcctttaaaattaatttaaaaaaagacgatatagactatatttttcttgcttaccttacttcccataactctttttctaatccaaattggactgagaagcgtatcgataatgtaatagctattttcgaaaattatcccaaattccaaaaattattacagccactcaaagatgctcttcccttatctggctcctatcatgatgagttggtaaaagttgctatcttttttttccgaacatttattttaggattaaatcaattaatccctgaaacaatttcatttccttcatggaactatcatagacatgataaattaactactattctccgaccgataattacaaattggttaagtaaaattggagaatgcacgtttaaagaacaacattttcttctcctttgtactcatctagaaagaatcatcaaaaatcatattcctccgatacagatagccgtactaactacagactttattaataaccaaattttaacagaatgcttattacagagattttcttctaaaaagattcatttccacccttactatttattaactgatgatctttccaatattactaatcttaatccagacattattattaccaataaaaagctttctccctttatcaaacatgagatttcttcagagagtttaattacatatattgatctgattaatacttcagaccaaatcaatcaaatccaaaaaattatttcatcaatacaggaagaaaaatattgcaaactttttgcaaaaactaatgaaataactaatcgtagctcctataactcttaaaaattaacattaaaaagctagagcattgtgtaatgctctagctttttaatgttaatttttttgaataatataatccaacttttcaactgttttttcccatgtgaaatgttctttaattcttttagcaatattctgttgtagtttctctcttaatgccttatcttttactaataaatcaagagattcatggagtgactgagtattttcttccatgatgattcctaactcagggctatcaataacttcaactgttccaccgcgatctgttgcaataatagcacttgaaagtagaccagcttctaaaatagaggttggtaatccctctggatacattgaagggtaaacaaagatatcagtctgtgccattaaagacatagtctgttcaaagtttaatttccccaaaaagttaatctgtttggactgatatttctctttcaaatgtgctaattcaggtccgtctcctgcaatctgtaaataaacattttcagagtactgtgacatcgaaaatgcttctaagagcaattcaatgcctttttctttaataattctaccagcataagtgatgaaaatatcatcagcagatttttckaggtaagccgtaccagcaaaatcagagcctagactttcagataccgaattataaataactcctttagcttctatattaaaatgttttaaccattcaacgcttctcttggataccgcataaaaatctggacgataatgcttaacacgcgctgtgagaagatgttcatagatagctccaaagaaatctaaaaaacgattattgacagaaaaatgacttgacccatggtctaaaacaatactaggtaaatggtgattctttgcaaaagatagcccttctagcgttgttaactgaaaacgtgtattacaaatcacaaaatcaatattttcatctgaaacatatttcatcagcgtgttgtattctcgatttttgttaataataggatagcgctgcttgacaatatttttggtcggtaaacggtaaatttttctacccttgtcttcatctataatcggtaaatcaccatgattagttgttacaataacaacacggtagccacgcttaaccaaatctgctgtcattttatctgtataacgttcaatacctccgaggaagggtagataatatcctgagaaaacagcaactgtttttaccttattttccatatttatccactttcatcaataagccatcttttaagcctttaatcatagcaactatttttttgctcttttgctcttctgctaccaacactcgaacaaattcatttcgcataaatactaaatatttgtatcgcttcttcttaccatatttttttataatatagatcgcattgcgtatcatgtaatattttcgaaatggtgaatgattcaatacatgaaaaacatggccaaattttttaactcgtgaagagtgtccaatttcgtgtaacagaccaataaaattaacctgataagtcttatatcccatctctgacagacgataattcatttcagagtcaacaaaatcaataaacatctcttctgcaaagccagatgtttcttcgaaaacgctcgttttcattaaagcagccgaagtaatacactcttcaatttctttatagtcaaattcttgcatcactaaattttcacggttcatatcttgatacaaacaagataacataccgaccttaggtaaatgaaggtaattttcataattatctatcaaatcacctaggacaaccgaatcttgatctaaagtcaagaaccaatcaaattcttgtgctactgcaaattgaccgatacagttcaaagcatatgcaatccctttattttctgttaaataatcaacagttaggtgcccctcttcattataatcggctactaattgagaaatttcttccttatttttcgagccattatctacgatatagatgtggcttacttgaggataaattgctcgaatgttctgatctaagcgttcaatattggggttaaaggtgacaatacccgctaaatatttcatgttctatgctcttttctaaaatctctaaataactgaatgactggtgctttggttataaaaacgataccgacatagatagttactgctactaaactttgaatgacataatttaccaatgatactgacatttgagtattgatataatagagtacagctccactaagagtagcagcaattaaatagcgcagcattcctcttgttaattctttaaaagtaaatacatctcttaaagagatagcttgatatagggagacaataaattcagtaataactgtagagataatagctcccatagcacctaaaattggtattaaaagtatattaagcacaacatttgccacaagtccaataactgcagacattgtgtaagcttttgtacgtcttgaagccagtagatactgtgtccctaaagcgttaccataagaaatgcaaatgatcatcaa

SEQ ID NO: 483 - DNA, 14000 bp, Streptococcus agalactiae
ggccttgttccgatgttgatcccgataactcctggctcattaatagcctgttcgtaacgctctttaattatctctaacttagcatgggtattggtaaaattttgaaaatagactaagtatttattaacttcaggccactttctatgcatgaaatcaatttctttatagaattgttcacgaataggagcttctggagcaactatagcatcccctgaaccagaaactgtgcaaaaagtgcaccctcctctagcaactgttccgtctctgttaggacagtcaaaaccagcatctataggtaatttaaatattttttctccaaagagttctcgataataatcattaatcgcacgataacgttttttcataggataattgtatcacaattttaactaaaataacctcactactacaataaaactaaaaaagattggaacatcagttagtcccaatcttttatttacttcactttctttaaccaatccttggctaaaaagatatacgcagttagattcaaaataccataagcaagtataaaaccagctaaaacatctgtcggaaaatgaacccctaggtaaatacgagataacccaattaaaaaaatgagcaaacccaaaataccttggcacaacagtttccatatactattaggcatatagtactgcaataaaataataatactcccaaatatcataaatgttcccatcgagtgcccactgggaaacgaatagccacctgcaaatactaaatggggtaaagttggtcttactctttgaaaaataagttttaaagaaagtatacatataccagagataatagcatttactgcgataaatctagcttgaggataccacttcttaaggtaacagaaagtgacgctcataatcgcaatagctatctggcttacagtattaccaatcacagtgattaacttgaaaaatcttgtagaaagatttggcaactgtcctctaacactttcttgaatagtttggtcaaatgcaattacagtgtcgggccaatatttgatgaccaatcctaaactgaaaaataagataatagcaataaatgcttgaataagtttactattttgacgagataacattagtctttttatatctttctaatattggcaaacaagccacgtaagttagatagaaaacaatcgaaattaaaattccctcaacgatattaaatggaataaccattgttaaaaggtaattgcctacaccaataaatgttctgatatcaaagttagcaaatatagcatacaaaggaatcgcaaagacatagttgagagctaccatagatacagtcaagctaactgtaccaaatagactagctttaataaaatcttttgcactctctctatttttccagaaaatagcgaaacttgctaaaaataaagctagagcaaccatattcatcggtaaaccgataaaggtttctggaccacgattagcaagtataacttttaaaagtgatcttaataagagtacaccataacttgatttcaaatcaaataaaataaaagtaactaacatcggaaggattgaaaaatcaacctttaaaaattctgctcctggtattaatggaaatgaaaccatcatcaatacaaaagataaggcagaaagaatggcgattgtcaccattttacgtgtatttgtcataaaaaaattcctccaatttaaataaattgaaagaagctccaaaggtaagcgtaggtacgcgaaaaaaacctttgtcttctcccatccagactttactgtcggttgtggaatctcaccacatcagctttcgctcgcggactgatgcttcacaactgacaaataagttggaagcgattaccgccggtcgggaattacaccctgccctgaagacacctatagcataacaaaaaaaacttgcaattgcaagttttttaattactaattagtagtagtgattaaaaatcatattaataccaaattactatactgtatcgtttctttcagatttgctatttttagtttttcttaaaaagataaacaaaattcccaaaataatacaaccaagaattgtcagtcctccaccaataatcattcctgttttaggaagaaatgattgtggaaaaagcggttgtgatggtttaggatttgttggtggaggagtttctttttcgttttctacctctacttcctgtgttttattagcaactacagcaactacagcatccttcatagatatacggtaaccagttagtgcttttacttctcgaaaaatatacttaccaggtaataaaccttcaacctcaatttctcccttatcatcagttactaatgaagtaatcccatcttgatcggtcgtaaatcgtccatttttaaagcgaactggctgattctggttatcgtataatacaaatattactcctgatagccttttctttatctttccttcttttgtatatttaataagttttaatcggcctgtttcaacttttcgcttaggatttatctgtaattgatttgataacttatcatctggtaattcaatataaaaaggtactattgttgaaacgctttgatcagctttataagcacgaccaaagtacgaaccatttgggagtgctatctttgtctgaccattagtatcagtaggagaagtcaagatactcttatacttctggttcaattcgctatctgtcatttggctcaataaatcaacttttaagttgtcagtcacagtccataaacgataagaaatcccctcctctgtagtatttggctgaagtcctatctgtgtgattgttagttgattaggggtatcagcatttacactggctaccgaaaaaaacgctaattgtaccaatcctaaaaagcaacatagtagaagtcctaaactttttctaatctttttcatttttgatttccctttctctttctctctttaaattttcgttttaaatataatagtaaagcgactaatataagaataactaggattgataagaggaaataaagtttatagtgtgtttgcaattctttcattaaatagttcttttctttaacaggaggtacatacttgattcgatgccctctaactagtaaacgatgtgaattaatcgaataaggtgtacatgttagcaaagtcgcataatccttacctttaacaaccaataatttagaaaaattatctggctttacaacacttatttgatcaaccttataggctaaaacttctttgatattatgaatataaaaaatttttccttttttaagtttatctaaatctgtaaataacttagctttaggtaagccgcgatgagctgtgataacagtatgtgaactttttccaccaattggcaaagaagttccttcaaggtgtcctgatcctttttcaagaacactactggtagtccccgcatagataggtaatttttgcttgatagacggtatatcaatatatccaatcatttcagtaatctcaagcatatgggcgtattcagcaataccttttttttctttttcagtatagggatctgataggcggcttgggtccagtgttctattataagcttttgctaactcaaatcgtctattaatctctttagcatttaatttttgggtttgattatcaaagttagttacttgattattagctttaatattatagtaccaatttgaaataaaaggatatgaggttatcaaaagacctactaagaataataatatcaaacctatattcatccatcgatttaaaacgaccgatttcttaaggtttttctgaaattttcctcgcattatgattcaattccttttctaacacttgataaacgatttttttgacgttgacgttttattaaccaaagtaaccaagcaataataactaaagatatatagaaaagatatctataaatcgtgtttaaatgaccgtcttttattaatttttcatcaataggacctttataagggatacgatgaccccttactaaaagtctgtgtgtattgaccataatcggggtgcaagtcaataaggttgcataatcatgtccaggaacaaccaacaaatctgaaaagttatcgggtgtaacgacttttatctgatctacttgatatgctatcgtttcttttatgttttgaatataaaacttatctcctttttttaactttttaaggttagaaaagagctctttatctggaattcctgagtgcgctgttataacggtatgggtgctattgcctccaattggaagagaggtaccttctaaatgacctgctcctttagatagaacttcttgacttgaacctgcaaatatagggagtttttgacctatcttaggaactgaaattatgccgattttttcacttacctctaacatacgggcgtactctgctatccccttttgaattcgttttttctcataaggatcttcaagatggacattatttaaagaatcattatatgcttgtgctagagccatacgccgattgatttctttctgactaagttttttagcagctctctcaaaatcttgtgtttggttattagattctatcgtatagtaaaatcgtgataccactggatacaataagatagatagacctattagaaaaagaatgataaaaggcagatttgatttctttttttttgtttttttgataatttttttagtcttcacgtcatctcctaaataatggctcttgcttatgatctaagagtacttctactgaaatacccttagatcataagcacagctttaactgtgcttacacatcatcaaaagctaatcttaaacttcctctgattgacgtcttttcatgataactaccgctccaagcataatacttaatccaataattgtgaaaaaaattgtaccaataccacctgtttgtggaatagtaaccttcttattgataacttgttgtgcatctttagttttagaaccttgggtatactcaatatcttgagcagaacctttactgtatgaagtagcattaacattaaacgaaacatcacctgataatttagcataaccagttggtgcttgtgtttcttccaatgagtattgaccttcagtcaagccagtaatttcaaattgacctttatcgttagaaatcaatttaacaacattcttagcatttttatcttcaacccattcgtatgagtagttagctttaacaaaggcatcattgtaagctttttgtttttcactaacggtagccaatgctgatttaccatcttgaccttcttgtttttctttagtcaaatcattgtaagctttaacagcagcatccaatgctgatttagttgaatctacagcagctttttctgcatctgttgcaacacctgatttacgtgccaagtacttgccatctttcttaacaaggaaggtagctcctgccaagcgttcttttccatctttatttgttttcacaaatttacgtccataagtcaccacttttggttctgatgggttgattggagttggctcatttgagtctttgttgttcttgatggttacaacgccatttacaaatgagacgtattctggagcgtagccgctaacacgttcgataacgcggtaagttttagcattatccaagttttcaaaagtgtgtttgaagctagttgcagctgttgctttagctgaatcaacattcacccatttgtcaccatctttaacttgcaaggtgaagacagcatcaactgtttcatctgctttattcacttcattgccatctactgcccatgttttgttaacagtgattttcttatcaactggaataccttcttttggttcattttcaattgttgggttgttgccgtagtccaatttaacatcattggtttctagaacttcaacgacagcagaaccgttcaaagtagctgagtaagtgatcttgatttcaacatcttttgtttttgcggcttttgccactgcttcaagacctttgtcagtcaagacaaggcggaaaccttggtcatctgctacaagtttgtaatttgtagcatcaagagttgcaccatccaatgttacagcaatatcgttgttgaaagtcaaacctttggtcatgctatcggtccagattaatttcttatagtctgaacctttaaggatttttgttccaacatggtattttttaacatcaccaacagatgctgagacagtccctttgtcttttttgttgttcgcataatcaagttctttatctgcgaagttcttatctacttgtggttttgtttcagtgttctttggataaacgtgagcgtctttaacaacaccattgtcgtttaccaatggaagagtgattttaactggaactgcttttgaatcagccaagatagaaccatcgttgttgtatgtagatttttctttcaattcaacgatttggtaagttcctgttaatttagaagtgttaaatttgaaaccattgtctgttgttaaacctttaagaacagcacaacctttggcatctgttgtatccaaagtatcaacttcttcaccattttcagtgatgtatttagtaccagcttcatttttgaaagcaaagtaagcacctgcgatttctttcgcttcgcctgagccaaagtaagttttaaggtcttcgatttgtttaccaacgtagtcagtattatccttaccctttgtaccagcagtaaaaccgtcaaatgcagttcgaggcatgacaatcttgtgcaaggtcactgtgtcagtagtttttgcttcttccgcaaacactggtgcaactgagaacaatgatgttacggtcagtagcaatgccgagaagactgcaaaatatttgttgatttttttcatttctatctccttcttattttagttaatcaacatgattaataatatgcggattttaatacaccgcagcaccactcccttcaagtcatggaattttagttaattaattaagaatactaaagcgcataatttttaatcttttttgatggacatatcactagatttcttataccttttccaaatataaattccacctgcaatagacatcatagctccacctattaaaatgaaagatagaattcctttcccacctgtcttaggaataattccttttggtggaatatgcgtgttggtaattaaatgcttgtcaccttcctcatgatattcagaaatctgtttattaacagctattatattttttatcgatcctttaaccacttcaaaagttaaaattggtttattagtaattttttgataatcctccggcgaaactgcttctattaactgatatttgccatctttcaaatctttgtaagaaattttgccgttttctcccgtcactacttttgaattattattttttattggtaaataaagtttataatcttcattaaattcttgaagttcaaacgtagctcctttgaggagcaacttattattatctttatcaacttttataaattcaatttcacctaacttcttctcgtttttaatcgttattgtaggatattctctcacatcacgaattttagggattggaaaatctctaagtgtattaggatcctctgacttaggattcaatgttgttctaccattagtgtcatagaatttgttacttataaaactgtcatctagtttcacatcatatgtgagtgttactttttgaccttctcctaaattcaaacctctaacatagagtttatttccgatgtattctaatttaacccccttaagtattccaccatcattattaggcccaccagttgcaataccatccttcattacacttccatcatttccctgtaaagtataatcacttggctgtaatatttgtccattaccaagctgtaaattgattttatcacccataggatcttcgatagttccattaacaattgagttttcttttgttaaaatcgtttcaaattgttgctgaattttagataaaatttcattgttagatgtatcggctgaagttacgataggggtgtagtactcaggtttggaagagaacgacctcattagttctgtgatttctccatctgaaagtttaaaagcttcctctttcaatttttgaaaagtaccatcttgatttttcttatactcctcattataaacttgtctaaaaccagatatatcgataccaaaattaaaaatgtcataatttttctgttttaaactatttatataaagtttggttggtgttccatgttctttcactggtccatttcgataaattgtacctttagggtaattaagatttaaatctaaataatgaagtttttgtaagtttccagagattatctgtgtttgataactatctaagggaaataaaaagtaactctccccatttccttttatatcatcgggcttatcagtaagtagaaaattacttttatttagatatccattttttttcatttgttcaaattggctttcatatgatgcacccagtttaaaattattaatagcatatgatctcgtaggaacaccatcagttacatgaacaataattttttgactatttcgatttacttgactcaaaatatcatctgcctccatgaaggctttcatagtaaatgtttctcctactttactaagatagtactccttttgttgctctggagttaatccattggtagtagatccccacttagctttaggagcttctgtcggaatcctttttataatctcttcagcattatttgttaattgtttatgactataattctctgtctgaattgtgaacttagtttgaaggccataatatttatcatcttctttaaatccttttacgacatctacactcctaccatcaaaaatatctgaaccataggtaactaatgcaaccctattatcactgtttgctcctaaaatatcttttactgcggtcccaagagcttcggcagctttcttggctttattatgcctttgaaaatttgggccatcgttattcattgagttagaattatcgagtacgaagacaacatctaacggcttttgtttgtccactggttttactatggtttttccactgacagttaactcaattttatatttattatgagctaaatcacctacttctgaaatacgtttagataatgttccctctggaatttctcttatatgctcaccttcacttgaatatgggttaactgcttttgcctctgactttccatttggaactgaacctttaacatgctcaagtttataagattcctttgtatcttcataaattcctgtggggggatactgcttatctagttcttcctgattttgtccaattgtggaatttttatcaccactattttgtatcgtagtttttccattactctcaaccttaacttgccaagtctggttagtctttttataaccttcgggcgctgtttcttctgataaagtataatctccaggtatgagattatcaaaagtagcttcacctgttagctcagcagttactttttctattttactttctggatgagcagtagtttttaaaacaaaggtagcttttgaaagtggtttgttctggtcatctgtctttttaacaactaactttcctttagcaccattttccggtacggtactttcccctaaaacattggtattaagcggtatttgcgacaaacaaaaaagacttaacgtcaatattttagaaaatttttggtattttctcattttacaactcctattgtgccgaaatgtcgtttctaaatctaagatcagatacagaatatcctagaatataaaaactatcacttattatgatatcaataatttcttattataaggtatggaattttaaagttttttcccaatttttgaatgatttttctttttatttgatacattattgtctctatcatggaaacgtattaattataatgtagttgtcccttactcaccccttttcattgaactacaaaatatatttatctatgatacattacaatattgtgtcaaaaatgttattatagattcctttaaaattaatttaaaaaagacgatatagactatatttttcttgcttaccttacttcccataactctttttctaatccaaattggactgagaagcgtatcgataatgtaatagctattttcgaaaattatcccaaattccaaaaattattacagccactcaaagatgcccttcccttatctgactcctatcatgacgagttggtaaaagttgctatcattttttcccgaacatttattttaggattaaatcaattaatccctgaaacaatttcatttccttcatggaactatcatagacatgataaattaactactattctccgaccgataattacaaattggttaagtgaaattggagaatacacgtttaaggaacaacattttcttctcctttgtgctcacctagaaagaattatcaaaaatcatattcctccgatacaaatagccgtactaactacagactttattaataacaaaattttaacagaatgtttatcacagaggttttcttctaaacagattcatttccacccttactatttattaactgatgatctttccaatattactaatcttaatccagatattattattaccaacccaaagctttcttcctttataaaacatgagatttcttcagagagtttaattacatatattgatttgattcatactccagaccagatcaatcaaatccaagaaattatttcatcaatacaagaagaaaaatattgtaaactttttgcaaagaacaatgaaataactacccgtagctcctataactcttaaaaattaacattaaaaagctagagcattacacaatgctctagctttttaatgttaatttttttgaataatataatccaacttttcaactgttttttcccaggtgaaatgttctttaattcttttagcaatattctgttgtagtttctctcttaatgccttatcttttactaataaatcaagagattcatggagtgactgagtattttcttccatgatgattcctaactcagggctatcgataacttcaactgttccaccgcgatctgttgcaataatagcacttgaaagtagaccagcttctaaaatagaggttggtaatccctctggatacattgatgggtaaacaaagatatcagtctgtgccattaaagacatagtctgttcaaagtttaatttccccaaaaagttaatctgtttggactgatatttctctttcaaatgtgctaattcaggtccgtctcctgcaatctgtaaataaacattttcagagtactgtgacatcaaaaatgcttctaagagcaattcaatgcctttttctttaataattctaccagcataagtgatgaaaatatcatcagcagatttttcaaggtaagccgtgtcagcaaaatcagagcctagactttcagataccgaattataaataactcctttagcttctatattaaaatgttttaaccattcaacgcttctcttggataccgcataaaaatctggacgataatgcttaacacgcgctgtgagaagatgttcatagatagctccaaagaaatctaaaaaacgattattgacagaaaaatgacttgacccatggtctaaaacaatactaggtaaatggtgcttctttgcaaaagatagcccttctaacgttgttaactgaaaacgtgtattacaaatcacaaaatcaatattttcatctgaaacatatttcatcagcgtgttgtattctcgatttttgttaataataggatagcgctgcttgacaatatttttggtcggtaaacggtaaatttttctacccttgtcttcatctataatcggtaaatcaccatgattagttgttacaataacaacacggtagccacgcttaaccaaatctgctgtcattttatctgtataacgttcaatacctccgaggaagggtagataatatcctgagaaaacagcaactgtttttaccttattttccatatttatccactttcatcaataagccatcttttaagcctttaatcatagcaactatttttttgctcttttgctcttctgctaccaacactcgaacaaattcatttcgcataaatactaaatatttgtatcgcttcttcttaccatatttttttataatatagatcgcattgcgtatcatgtaatattttcgaaatggtgaatgattcaatacatgaaaaacatggccaaattttttaactcgtgaagagtgtccaatttcgtgtaacagaccaataaaattaacctgataagtcttatatcccatctctgacagacgataattcatttcagagtcaacaaaatcaataaacatctcttctgcaaagccagatgtttcttcgaaaacgctcgttttcattaaagcagccgaagtaatacactcttcaatttctttatagtcaaattcttgcatcactaaattttcacggttcatatcttgatacaaacaagataacataccgaccttaggtaaatgaaggtaattttcataattatctatcaaatcacctaggacaaccgaatcttgatctaaagtcaagaaccaatcaaattcttgtgctactgcaaattgaccgatacagttcaaagcatatgcaatccctttattttctgttaaataatcaacagttaggtgcccctcttcattataatcggctactaattgagaaatttcttccttatttttcgagccattatctacgatatagatgtggcttacttgaggataaattgctcgaatgttctgatctaagcgttcaatattggggttaaaggtgacaatacccgctaaatatttcatgttctatgctcttttctaaaatctctaaataactgaatgactggtgctttggttataaaaacgataccgacatagatagttactgctactaaactttgaatgacataatttaccaatgatactgacatttgagtattgatataatagagtacagctccactaagagtagcagcaattaaatagcgcagcattcctcttgttaattctttaaaagtaaatacatctcttaaagagatagcttgatatagggagacaataaattcagtaataactgtagagataatagctcccatagcacctaaaattggtattaaaagtatattaagcacaacatttgccacaagtccaataactgcagacattgtgtaagcttttgtacgtcttgaagccagtagatactgtgtccctaaagcgttaccataagaaatgcaaatgatcatcaaagactcaacagccattagcggaccgacagcttcataccctttcccaaaaaagaagacagcaaatgtcgacgaaactcctaccactcccgcaatcattaacattgagatagcattgcttaaatcaacaagtttcaaaagtaaagccttagcttgcttttcttttcctgaagaaaatagactggagagccttggtaagaaaactcctccgattgctgaaacaatggtaaataaaatacgaataattttatcagattgatcaaaatatccagcactgaccacactatccattgctcccagcatactcttgttaagagagagataaatctgcatggtgatttggggtaaaaataacattaaagttggtcttagatgtattaagatatctaatctactaaatggtatcttgatgatttcatgctttaaatgatgccagactgttaaatttccgagtaatgatgcaaatgcaattaaaaacatataaagtgctaggtcatctggcgtcttcacaactaagaaggtcaaaacaactgtaataagcttaacaatggtattacgaatgacaattatcttaaagtcttcaactccaataaaataccacgaaatatcagttgcagtcgctaataaattaataccttgaattaaatagaataattgccattcgtttgtaagtaagacaaatccaaagaataataacgttgctatagatacagaggcaagttttaatacaactaattcccaaaatatcttacttctcttatacttatttgactgcacaaaagctatctcacgattaccgtacaaagatatc

SEQ ID NO: 484 - DNA, 14000 bp, Streptococcus agalactiae
ggccttgttccgatgttgatcccgataactcctggctcattaatagcctgttcgtaacgctctttaattatctctaacttagcatgggtattggtaaaattttgaaaatagactaagtatttattaacctcaggccactttctatgcatgaaatcaatttctttatagaattgttcacgaataggagcttctggagcaactatagcatcccctgaaccagaaactgtgcaaaaagtgcaccctcctctagcaactgttccatctctgttaggacagtcaaaaccagcatctataggtaatttaaatattttttctccaaagagttctcgataataatcattaatcgcacgataacgttttttcataggataattgtatcacaattttaactaaaataacctcactactacaataaaactaaaaaagattggaactaactgacgttccaatcttttatttacttcactttctttaaccaatccttggctaaaaagatatacgcagttagattcaaaataccataagcaagtataaaaccagctaaaacatctgtcggaaaatgaacccctaggtaaatacgagataacccaattaaaaaaatgagcaaacccaaaataccttggtacaacagtttccatatactcttaggcatatagtactgcaataagataataatactcccaaatatcataaatgttcccatcgagtgcccactgggaaacgaatagccacctgcaaatactaaatgggttaaagttggtcttactctttgaaaaataagttttaaagaaagtatacatataccagagataatagcatttactgcgataaatctagcttgaggataccacttcttaaggtaacagaaagtgacgctcataatcgcaatagctatctggcttacagtattaccaatcacagtgattaacttgaaaaatcttgtagaaagatttggcaactgtcctctaacactttcttgaatagtttggtcaaatgaaattacagtgtcgggccaatatttgatgaccaatcctaaactgaaaaataagataatagcaataaatgcttgaataagtttactattttgacgagataacattagtctttttatatctttctaatattggcaaacaagccacgtaagttagatagaaaacaatcgaaattaaaattccctcaacgatattaaatggaataaccattgttaaaaggtaattgcctacaccaataaatgttctgatatcaaagttagcaaatatagcatacaaaggaatcgcaaagacatagttgagagctaccatagatacggtcaagctaactgtaccaaatagactagctttaataaaatcttttgcactctctctatttttccagaaaatagcgaaacttgctaaaaataaagctagagcaaccatattcatcggtaaaccaataaacgtttctggaccacgattagcaagtataacttttaaaagtgatcttaataagagtacaccataacttgatttcaaatcaaataaaataaaagcaactaacatcggaaggattgaaaaatcaacctttaaaaattctgctcctggtattaatggaaatgaaaccatcatcaatacaaaagataaggcagaaagaatggcgattgtcaccattttacgtgtatttgtcataaaaaaattcctccaatttaaataaattgaaagaagctccaaaggtaagcgtatgtacgcgaaaaaacctttgtcttctcccatccagactttactgtcggttgtggaatctcaccacatcagctttcgctcgcggactgatgcttcacaactgacaaataagttggaagcgattaccgccggtcgggaattacaccctgccctgaagacacctatagcataacaaaaaaaacttgcaattgcaagttttttaattactaattagtagtagtgattaaaaatcatattaataccaaattactatactgtatcgtttctttcagatttgctatttttagtttttcttaaaaagataaacaaaattcccaaaataatacaaccaagaattgtcagtcctccaccaataatcattcctgttttaggaagaaatgattgtggaaaaagcggttgtgatggtttaggatttgttggtggaggagtttctttttcgttttctacctctacttcctgtgttttattagcaactacagcaactacagcatccttcatagatatacggtaaccagttagtgcttttgcttctcgaaaaatatacttaccaggtaataaaccttcaacctcaatttctcccttatcatcagttactaatgaagtaatcccatcttgatcggtcgtaaatcgtccatttttaaagcgaactggctgattctggttatcgtataatacaaatattactccggatagccttttctttatctttccttcttttgtatatttaataagttttaatcggcctgtttcaacttttcgcttaggatttatctgtaattgatttgataacttatcatctggtaattcaatataaaaaggtactattgttgaaacgctttgatcagctttataagcacgaccaaagtacgaaccatttgggagtgctatctttgtctgaccattagtatcagtaggagaagtcaagatactcttatacttctggttcaattcgctatctgtcatttggctcaataaatcaacttttaagttgtcagtcacagtccataaacgataagaaatcccctcctctgtagtatttggctgaagtcctatctgtgtgattgttagttgattaggggtatcagcatttacactggctaccgaaaaaaacgctaattgtaccaatcctaaaaagcaacatagtagaagtcctaaactttttctaatctttttcatttttgatttccctttctctttctctctttaaattttcgttttaaatataatagtaaagcgactaatataagaataactaggattgataagaggaaataaagtttatagtgtgtttgcaattctttcattaaatagttcttttctttaacaggaggtacatacttgattcgatgccctctaactagtaaacgatgtgaattaatcgaataaggtgtacatgttagcaaagtcgcataatccttacctttaacaaccaataatttagaaaaattatctggctttacaacacttatttgatcaaccttataggctaaaacttctttgatattatgaatataaaaaatttttccttttttaagtttatctaaatctgtaaataacttagctttaggtaagccgcgatgagctgtgataacagtatgtgaactttttccaccaattggcaaggaggttccttcaaggtgtcctgctcctttttcaagaacactactggtagtccccgcatagataggtaatttttgcttgatagacggtatatcaatatatccaatcatttcagcaatctcaagcatgtgggcgtattcagcaataccttttttttctttttcagtatagggatctgataggcggcttgggtccagtgttctattataagcttttgctaactcaaatcgtctattaatctctttagtatttaatttttgggtttgattatcaaagttagttacttgattattagctttaatattatagtaccaatttgaaataaaaggatatgaggttatcaaaagaccaactaagaacaatagtatcaggcctacattcatccatcgatttaaaacgaccgatttcttaaggtttttctgaaattttcctcccattatgattcaattccttttctaacacttgctaaacgatttttttgacgttgacgttttattaaccaaagtaaccaagcaataataactaaagatatatagaaaagatatctataaatcgtgtttaaatgaccttctttcattaatttttcatcaataagacctttataaggaatacgatgtccccttactaaaagtctgtgtgtattgaccataatcggggtgcaagttaataaggttgcataatcatgtccaggaacaaccaacaaatctgaaaagttatcgggtgtaacgacttttatctgatctacttgatatgctatcgtttcttttatgttttgaatataaaacttatctcctttttttaactttttaaggttagaaaagagttctttatctggaattcctgagtgcgctgttataacggtatgtgtgctatttcctccaattggaagagaagtaccttctaaatgccctgctcctttagatagaactttttgacttgaacctgcaaatatagggagtttttgacctatcttaggaactgaaattgtgccgattttttcacttacctctaacatacgggcgtactctgctacccccttttgaattcgtttcttctcataaggatcttcaagatggacattatttaaagaatcattataagcttgtgctagagtcatacgacgattgatttctttctgactaagttttttagcagctctctcaaaatcctgtgtttgattattagattctatcgtatagtaaaaacgtgataccactggatacaataaaatagatagacctattagaaaaagaatgataaaaggaagatttgacttcttctttttagtttttttgttgatatttttagtcttcacgtcatctcctaaataatggctcttgcttatgatctaagagtacttctactgaaatacccttagatcataagcacagctttaactgtgcttatacatcatcaaagactagccttaagcttcctctgattgacgttttttcatgataactactgctccaagcataatgcttaaaccaataattgtgaaaagaattgtaccaataccacctgtttgtgggatggttacttttttgttttgaacttgttgggcatctttttttacagagcctttatcatatgcgatgtcagttgtagcccctttgctatatgatgtggcagttacttcaaagtttacatcacctgacaatgtcgcataacctgctggtgcttgagtttcttccaagccataagtgcctttatccaaaccagtaatttcaaattgaccaccggcgttagagatcaatttaacaacattatcagcctttttatctgcaacccattcatatgagtagttagctttaacaaaagcgtcattgtaagctttttgtttttgatcaacagtagccaatgctgttttaccttcttggccttcttgtttttctttagtcaagtcgttataagctttaacagcttcatccaatgctagtttagcagtttttacagctgcctttgcttcagcagttgctgcacctgctttacgtgccaagtatttgccttctttcttaacgaggaaggtagctcctgccaagcgttcagtgttagcttgatttgttttcacaaatttacgtccataagtcaccacttttggttctgatgggttgattggagttggatcatttgagtttttgttgttcttgatagtcacaacaccatttttaaatgatacgtattctggagtgtagccgctaacacgttcgacaacgcggtaagttttagcattatccaaacctgtgaaagtatgttcaaagcgtgatggttttgttgcttcgtgtgaagcaacgttcacccatgtaccatccgtttgtttttcttgcaaggtaaagatagctttaactgcaacattagcatcagtaattgtaccatctactgcccagtctttaatgactttaatttcttggttagctggagtaccttcttgtggttcactttcttccgttgggttattaccatagtccaatttaacatcattggtttctggaatttcaacagtagtggagccgttcaccgtagctgagtaagtgatcttgatttcaacatctttgtcttttgcagctgctgctactgctgcaagacctgttgcattcaaggcaagacggaaaccttggtcatctgttacgagtttgtagtttaaaacaggaaaatcttcaccatccaatgttactttaacgttgttgttgaacgtcaaacctttagtcatgctatcagtccaaaccagtttcttatagtctgagcctttaagaatttttgttccaactatgtattcttttttgtcaccaactgtcgctgagacaacacctttgtcttttcggttgtcagtataatcaagatctttatctgcaaagttcttatctacttgtggttttgtttcagtattctttggataaatgtgagcatctttaacaacaccttggttgtttaccaatggcagagtgattttaactggaactgcttttgaatcagccaagatagaaccgttgttatcgtagtttgatttttctttcaattcaacgatttggtaaattccttttaacttagcagtgttaaaaacaaaaccattgtcttttgttaaccctgaaagaacagcaccaccttcagcatctttagcttccaaagtatcgacttccttaccattttcagtaatgaattttgtaccagtttcatttttgaaaacaaagaaagcacccttgatttctttagcatcggttgagccaaaataagatttaaggtcattaatttgtttaccaacataatcgctatcattcttaccttttgtaccttcagtaaagttatcaaatgcagcttgtggcatgacaatcttgtgcaaggtcacagtatcagttgttgcgtcgtccgcaaacgctggtgcaactgagaatagtgacgttaagatcaatagcagtgtcgagaacattgtaagacatttgttgatttttttcatttctatctccttcttattctagttaatcaacatagataataatatacggattataatattaccgcagcaccactcctttcgaattatatttaattaattaagaatactaaaacacatgattcttaatctttttctctagatatatcactagatttcttatatcttttccaaatataaattccacctgcaatagacatcatagatccacctattaaaatgaaagatagaattcctttcccacctgtcatcggaataattccttttggtggaatatgcgtgttggtaattaaatgcttgtcaccttcctcatgatattcagaaatctgtttattaacagctattatattttgtatcgatcctttaacaacttcaaaagttaaaattggtttattagtaattttttgataatccttcggcgaaactgcttctattaactgatatttgccatctttcaaatctttgtaagaaattttgccgttttctcccgtcactacttttgaattattattttttattggtaaataaagtttataatcttcattaaattcttgaagttcaaacgtagctcctttgagaagcaacttattattatctttatcaacttttgtaaattcaatttcacctaacttcttctcgtttttaatcgttattgtaggatattctctcacatcacgaattttagggattggaaaatctctaagtgtattaggatcctctgatttaggattcaatgttgttctaccattagtgtcatagaatttgttacttataaaactgtcatctagtttcacatcatatgtgagtgttactttttgtccctcccctaagttcaaacctctaacgtagagtttatttttgatgtattctaatttaacccctttaagtattccaccatcattattaggcccaccagttgcaatgctatctttcattatacttccatcatttccctgtaaagtataatcacttggttgcaatgtttgtccgttgccaagctgtaaattgattttgtcacccataggatcttctatagttccattaacaattgagttttcttttgttaaaatcttttcaaattgttgctgaattttagataaaatttcattgttagatgcatcggatgaagttactatcggggtataatactcaggtttagaagagaatgacttcattagttctgttatttccccatctgaaagttcaaaagcttcctctttcaatttttgaaaagtaccatcttgatttttcttataatcctcattataaacttgtctaaaaccagatatatctataccaaaattaaagatgtcataatttttctgttttaaactatttatataaagtttggttggtgttccatgttctcttactggtccatttcgataaaatgtacctttagggtaattaagatttaaatctaaataatgaagtttttgtaagtttccagagattatctgtgtttgataactatctaagggaaacaaaaagtaactctccccatttccttttatatcctcgggcttatcagtaagtagaaaattacttttatttagatatccattttttttcatttgttcaaattggctttcatatgatgcacccagtttaaaattattaatagcatatgatctcgtaggaacaccatcagttacatgaacaataattttttgactatttcgatttacttgactcaaaatatcatctgcctccatgaaggctttcatagtaaatgtttctcctactttactaagatagtactccttttgttgctctggagttaatccattggtagtagatccccacttagctttaggagcttctgtcggaatcctttttataatctcttcagcattatttgttaattgtttatgactataattctctgtctgaattgtgaacttagtttgaaggccataatatttatcatcttctttaaatccttttacgacatctacactcctaccatcaaaaatatctgaaccataggtaactaatgcaaccctattatcactgtttgctcctaaaatatcttttactgcggtcccaagagcttcggcagctttcttggctttattatgcctttgaaaatttgggccatcgttattcattgagttagaattatcgagtacgaagacaacatctaacggcttttgtttgtccactggttttactatggtttttccactgacagttaactcaattttatatttattatgagctaaatcacctacttctgaaatacgtttagataatgttccctctggaatttctcttatatgctcaccttcacttgaatatgggttaactgcttttgcctctgactttccatttggaactgaacctttaacatgctcaagtttataagattcctttgtatcttcataaattcctgtggggggatactgcttatctagttcttcctgattttgtccaattgtggaatttttatcaccactattttgtatcgtagtttttccattactctcaaccttaacttgccaagtctggttagtctttttataaccttcgggcgctgtttcttctgataaagtataatctccaggtatgagattatcaaaagtagcttcacctgttagctcagcagttactttttctattttactttctggatgagcagtagtttttaaaacaaaggtagcttttgaaagtggtttgttctggtcatctgtctttttaacaactaactttcctttagcaccattttccggtacggtactttcccctaaaacattggtattaagcggtatttgcgacaaacaaaaaagacttaacgtcaatattttagaaaatttttggtattttctcattttacaactcctattgtgccgaaatgtcgtttctaaatctaagatcagatacagaatatcctagaatatacaaactatcacttattatgatatcaataatttcttattataaggtatggaattttaatgttttttcccaatttttgaataatttttctttttatttgataatcttattttttattatcttagaaatatttcaatgagcttaagtagttgatttttctttttttatgttttaaaatattgcttaaaaataatgtttgagagagtttactgaattgattgaaaattatttagaaaaagacatccttaatcaaataaaacttctaactttatgctatgattactacccttccattactctagacaaatcatgtcatcaacttggtttatctgaactacttattaggaaatattgtcatgatttaacaactttatttaacagtcaactctctctgaatatcgaaaagagtacaatagtctaccaatctaatggtgtaactagagaacaagctttcaaatatatttatcatcaatcacacgttttacaacttttaaaatttttgatcacgaatgattcaggcaggttacctttaacttactttagtgaaaaatttggactatcttgtgcaactgcttatcgcatacgaaaacatattagtccattactagaaaaacttggatttcagattgtcaaaaatactattaccggtgacgagtatcgaattcgctatttaatcgcatttttaaatgctcaatttggtatagaagtttatcccatgtctaagatggataaattgctcatcaaacgattgttattagaacactcaactacttttactgcttctcattacttcccaaatacatttattttctttgatacattgttgtctctatcatggaaacgtattaattataatgtagttgtcccttactcatcccttttcactgaactacaaaatatatttatctatgatacattacaatattgtgtcaaaaatgttattatagattcctttaaaattaatttaaaaaaagacgatatagactatatttttcttgcttaccttacttcccataactctttttctaatccaaattggactgagaagcgtatcgataatgtaatagctattttcgaaaattatcccaaattccaaaaattattacagccactcaaagatgctcttcccttatctggctcctatcatgatgagttggtaaaagttgctatcttttttttccgaacatttattttaggattaaatcaattaatccctgaaacaatttcatttccttcatggaactatcatagacatgataaattaactactattctccgaccgataattacaaattggttaagtaaaattggagaatacacgtttaaagaacaacattttcttctcctttgtactcatctagaaagaatcatcaaaaatcatattcctccgatacagatagccgtactaactacagactttattaataaccaaattttaacagaatgcttattacagagattttcttctaaaaagattcatttccacccttactatttattaactgatgatctttccaatattactaatcttaatccagacattattattaccaataaaaagctttctccctttatcaaacatgagatttcttcagagagtttaattacatatattgatctgattaatacttcagaccaaatcaatcaaatccaaaaaattatttcatcaatacaggaagaaaaatattgcaaactttttgcaaaaactaatgaaataactaatcgtagctcctataactcttaaaaattaacattaaaaagctagagcattgtgtaatgctctagctttttaatgttaatttttttgaataatataatccaacttttcaactgttttttcccatgtgaaatgttctttaattcttttagcaatattctgttgtagtttctctcttaatgccttatcttttactaataaatcaagagattcatggagtgactgagtattttcttccatgatgattcctaactcagggctatcaataacttcaactgttccaccgcgatctgttgcaataatagcacttgaaagtagaccagcttctaaaatagaggttggtaatccctctggatacattgaagggtaaacaaagatatcagtctgtgccattaaagacatagtctgttcaaagtttaatttccccaaaaagttaatctgtttggactgatatttctctttcaaatgtgctaattcaggtccgtctcctgcaatctgtaaataaacattttcagagtactgtgacatcgaaaatgcttctaagagcaattcaatgcctttttctttaataattctaccagcataagtgatgaaaatatcatcagcagatttttcaaggtaagccgtaccagcaaaatcagagcctagactttcagataccgaattataaataactcctttagcttctatattaaaatgttttaaccattcaacgcttctcttggataccgcataaaaatctggacgataatgcttaacacgcgctgtgagaagatgttcatagatagctccaaagaaatctaaaaaacgattattgacagaaaaatgacttgacccatggtctaaaacaatactaggtaaatggtgattctttgcaaaagatagcccttctagcgttgttaactgaaaacgtgtattacaaatcacaaaatcaatattttcatctgaaacatatttcatcagcgtgttgtattctcgatttttgttaataataggatagcgctgcttgacaatatttttggtcggtaaacggtaaatttttctacccttgtcttcatctataatcggtaaatcaccatgattagttgttacaataacaacacggtagccacgcttaaccaaatctgctgtcattttatctgtataacgttcaatacctccgaggaagggtagataatatcctgagaaaacagcaactgtttttaccttattttccatatttatccactttcatcaataagccatcttttaagcctttaatcatagcaactatttttttgctcttttgctcttctgctaccaacactcgaacaaattcatttcgcataaatactaaatatttgtatcgcttcttcttaccatatttttttataatatagatcgcattgcgtatcatgtaatattttcgaaatggtgaatgattcaatacatgaaaaacatggccaaattttttaactcgtgaagagtgtccaatttcgtgtaacagaccaataaaattaacctgataagtcttatatcccatctctgacagacgataattcatttcagagtcaacaaaatcaataaacatctcttctgcaaagccagatgtttcttcgaaaacgctcgttttcattaaagcagccgaagtaatacactcttcaatttctttatagtcaaattcttgcatcactaaattttcacggttcatatcttgatacaaacaagataacataccgaccttaggtaaatgaaggtaattttcataattatctatcaaatcacctaggacaaccgaatcttgatctaaagtcaagaaccaatcaaattcttgtgctactgcaaattgaccaatacagttcaaagcatatgcaattcctttattttctgttaaataatcaacagttaggtgcccctcttcattataatcggccactaattgagaaatttcctccttatttttcgagccattatctacgatgtagatatggcttacttgaggataaattgctcgaatgttctgatctaagcgttcaatattggggttaaaggtgacaatacccgctaaatatttcatgttctatgctcttttctaaaatctctaaataactgaatgactggtgctttggttataaaaacgataccgacatagatagttactgctactaaactttgaatgacataatttaccaatgatactgacatttgagtattgatataatagagtacagctccactaagagtagcagcaattaaatagcgcagcattcctcttgttaattctttaaaagtaaatacatctcttaaagagatagcttgatatagagagacaataaattcagtaataactgtagagataatagctcccatagcacctaaaattggtattaaaagtatattaagcacaacatttgccacaagtccaataactgcagacattgtgtaagcttttgtacgtcttgaagccagtagatactgtgtccctaaagcgttaccataagaaatgcaaatgatcatcaaagactcaacagccattagcggaccgacaacttcataccctttcccaaaaaagaagacagcaaatgtcgacgaaactcctaccactcccgcaatcattaacatt

SEQ ID NO: 485 - DNA, 14000 bp, Streptococcus agalactiae
ggccttgttccgatgttgatcccgataactcctggctcattaatagcctgttcgtaacgctctttaattatctctaacttagcatgggtattggtaaaattttgaaaatagactaagtatttattaacctcaggccactttctatgcatgaaatcaatttctttatagaattgttcacgaataggagcttctggagcaactatagcatcccctgaaccagaaactgtgcaaaaagtgcaccctcctctagcaactgttccgtctctgttaggacagtcaaaaccagcatctataggtaatttaaatattttttctccaaagagttctcgataataatcattaatcgcacgataacgttttttcataggataattgtatcacaattttaactaaaataacctcactactacaataaaactaaaaaagattggaacgtcagttagtcccaatcttttatttacttcactttctttaaccaatccttggctaaaaagatatacgcagttagattcaaaataccataagcaagtataaaaccagctaaaacatctgtcggaaaatgaacccctaggtaaatacgagataacccaattaaaaaaatgagcaaacccaaagtaccttggcacaacagtttccatatactcttaggcatatagtactgcaataaaataataatactcccaaatatcataaatgttcccatcgagtgcccactgggaaacgaatagccacctgcaaatactaaatgggttaaagttggtcttactctttgaaaaataagttttaaagaaagtatacatataccagagataatagcatttactgcgataaatctagcttgaggataccacttcttaaggtaacagaaagtgacgctcataatcgcaatagctatctggcttacagtattaccaatcacagtgattaacttgaaaaatcttgtagaaagatttggcaactgtcctctaacactttcttgaatagtttggtcaaatgaaattacagtgtcgggccaatatttgatgaccaatcctaaactgaaaaataagataatagcaataaatgcttgaataagtttactattttgacgagataacattagtctttttatatctttctaatattggcaaacaagccacgtaagttagatagaaaacaatcgaaattaaaattccctcaacgatattaaatggaataaccattgttaaaaggtaattgcctacaccaataaatgttctgatatcaaagttagcaaatatagcatacaaaggaatcgcaaagacatagttgagagctaccatagatacggtcaagctaactgtaccaaatagactagctttaataaaatcttttgcactctctctatttttccagaaaatagcgaaacttgctaaaaataaagctagagcaaccatattcatcggtaaaccaataaacgtttctggaccacgattagcaagtataacttttaaaagtgatcttaataagagtacaccataacttgatttcaaatcaaataaaataaaagcaactaacatcggaaggattgaaaaatcaacctttaaaaattctgctcctggtattaatggaaatgaaaccatcatcaatacaaaagataaggcagaaagaatggcgattgtcaccattttacgtgtatttgtcataaaaaaattcctccaatttaaataaattgaaagaagctccaaaggtaagcgtatgtacgcgaaaaaacctttgtcttctcccatccagactttactgtcggttgtggaatctcaccacatcagctttcgctcgcggactgatgcttcacaactgacaaataagttggaagcgattaccgccggtcgggaattacaccctgccctgaagacacctatagcataacaaaaaaaacttgcaattgcaagttttttaattactaattagtagtagtgattaaaaatcatattaataccaaattactatactgtatcgtttctttcagatttgctatttttagtttttcttaaaaagataaacaaaattcccaaaataatacaaccaagaattgtcagtcctccgccaataatcattcctgttttaggaagaaatgattgtggaaaaagcggttgtgatggtttaggatttgttggtggaggagtttctttttcgttttctacctctacttcctgtgttttattagcaactacagcaactacagcatccttcatagatatacggtaaccagttagtgcttttgcttctcgaaaaatatacttaccaggtaataaaccttcaacctcaatttctcccttatcatcagttactaatgaagtaatcccatcttgatcggtcgtaaatcgtccatttttaaagcgaactggctgattctggttatcgtataatacaaatattactccggatagccytttctttatctttccttcttttgkatatttaataagttttaatcggcctgtttcaacttttcgcttaggatttatctgtaattgatttgataacttatcatctggtaattcaatataaaaaggtactattgttgaaacgctttgatcagctttataagcacgaccaaagtacgaaccatttgggagtgctatctttgtctgaccattagtatcagtaggagaagtcaagatactcttatacttctggttcaattcgctatctgtcatttggctcaataaatcaacttttaagttgtcagtcacagtccataaacgataagaaatcccctcctctgtagtatttggctgaagtcctatctgtgtgattgttagttgattaggggtatcagcatttacactggctaccgaaaaaaacgctaattgtaccaatcctaaaaagcaacatagtagaagtcctaaactttttctaatctttttcatttttgatttccctttctttttctctctttaaattttcgttttaaatataatagtaaagcgactaatataagaataactaggattgataagaggaaataaagtttatagtgtgtttgcaattctttcattaaatagttcttttctttaacaggaggtacatacttgattcgatgccctctaactagtaaacgatgtgaattaatcgaataaggtgtacatgttagcaaagtcgcataatccttacctttaacaaccaataatttagaaaaattatctggctttacaacacttatttgatcaaccttataggctaaaacttctttgatattatgaatataaaaaatttttccttttttaagtttatctaaatctgtaaataacttagctttaggtaagccgcgatgagctgtgataacagtatgtgaactttttccaccaattggcaaagaagttccttcaaggtgtcctgctcctttttcaagaacactactggtagtccccgcatagataggtaatttttgcttgatagacggtatatcaatatatccaatcatttcagcaatctcaagcatgtgggcgtattcagcaataccttttttttctttttcagtatagggatctgataggcggcttgggtccagtgttctattataagcttttgctaactcaaatcgtctattaatctctttagcatttaatttttgggtttgattatcaaagttagttacttgattattagctttaatattatagtaccaatttgaaataaaaggatatgaggttatcaaaagaccaactaagaacaatagtatcaagcctacattcatccatcgatttaaaacgaccgatttcttaaggtttttctgaaatcttcctcccattatgattcaattccttttctaacacttgctaaacgatttttttgacgttgacgttttattaaccaaagtaaccaagcaataataactaaagatatatagaaaagatatctataaatcgtgtttaaatgaccttctttcattaatttttcatcaataggacctttataaggaatacgatgtccccttactaaaagtctgtgtgtattgaccataatcggggtgcaagtcaataaggttgcataatcatgtccaggaacaaccaataaatctgaaaagttatcgggtgtaacgacttttatctgatctacttgatatgctatcgtttcttttatgttttgaatataaaacttatctcctttttttaactttttaaggttagaaaagagttctttatctggaattcctgaatgtgctgttataacagtatgtgtactattgcctccaattggaagagaggtgccttctaaatgccctgctcctttagatagaacttcttgacttgaacctgcaaatatagggagtttttgacctatcttaggaactgaaattgtgccgattttttcacttacctctaacatacgggcgtactctgctacccctttttgaattcgttttttctcataaggatcttcaaaatggacattatttaaagaatcattataagcttgtgctagagccatacgtcgattgatttctttctgactaagttttttagcagctctctcaaaatcctgtgtttgattattggattctatcgtatagtaaaaacgtgataccactggatacaataaaatagatagacctattagaaaaagaatgataaaaggaagatttgacttcttctttttagtttttttgatgatatttttagtcttcacgtcatctcctaaataatggctcttgcttatgatctaagagtacttctactgaaatacccttagatcataagcacagctttaactgtgcttatacatcatcaaagactagccttaagcttcctctgattgacgtcttttcatgataattaccgctccaagcataatgcttaaaccaataattgtgaaaagaattgtaccaataccacctgtttgtggaatagtcacttttttgttttctatgcgttgagcgtcttttttattgctgctagcagtgtaatcaatgttacctgagtcgtctgcttttgagctgtttccaactttgaaatcaacatcacctgctaatttagcgtaaccagctggagcttgtgtttcttcaagtttataatcaccagttgcaagaccgctaacttcaaattgaccgtcagcgtttgaagtcactttaacaacgttagcatcttctttattagttacccactcgtaagctgtacgagctacgatgaaggctgcattgtaagcgtcttgagcagttttgatttctgctttagctgtttcacctttagtacctttttgatcgtctgctgaaagtttgttgtaagctgcgattttagcgtcaagagcagttttagcatttgtgtaagctgttgtttgagctgatattgtcgcagatgatttcaatgcaaggtatttaccagctgaatctttaacaacgaactgtgcaccttgcaagcgttctgtttcagtcgaacttgttttgacgaattttttaccgtgtgtcacaacttttggttcagttggattaagtggtgttgggttgtctgaatctggagtattggtgatagctgcactaccagcaccagtagtgattgtattaccataaccagcgatacgttctgagatcatgtatgttttactatcagtcagaccactgaatttaccagcaaacgctccagtaactgtaaatttaataccattacctaagttgatttcgccatttggtgttgtttttgtcaatgaaactgaggcaacagctgttccaccatctttaagggtataaacaacattcgcattctctaaatctgaacctttgtcccaagttttgctaacagtgatttcgccatttgacggtgttactgggatttcttttacttttttacctggtttgttaccgtattgaagtttgatatcattgctttctggcttgtcatcaatagccgcaccgttaactgttgcgctatatgtcaatgtgaattcaacagcttgtgtttccgcttctttttgtagcttagtcaaacctgtatctgtgaatttcaaagtgaaaccacggtcatcacgttcaacattgtaatctgtaccttctacaaaagagcctgacgatgcttctaagttaacagtgttacccattgtcaaaccatttgacatggtatcgacccaagcaaggtttttgtatttagaccctttttggatttttgttttaacttcgtaagggatttcttgaccgatttcagcagtagcttttgctttttctgcctgatatttgtcgtagtctgccccacctgcaatagctgaattatcactgtcattcaacaatttatttgctttagcaaagtttttgtcgatttgtggtgcttcttctgtattctttggatacacttcagcgtccacgacaattccttcttcgttatacaaaggaagagtgattttcactgggacagcttttgagtcagcaagaactttgtcaccatttttataattagatttgtcaagcaactcaacgatttggtatgttccttttaagtttgcagtattaaatgtaatgccgttttcagttgtcaaacctttaaggacacctgctgcatcgatactttctacttcagtaccactttctgtgatatattttgtctgactttcattcataaccgcaaagaaagcaccggcgatttctttagaaccttgcccaaaatatcctgaaatgtcagtaagtttttgacccatatacttcgttccattcaatccatttattcctgggaaatttggcttagccaaattatcggatgtttgaacaattttgtgtaaggttactgttttagtgatatttcccatctcagcagcaaataccggagctaccgataacaacgatgttaaaattaataacaatgccgagaacattgcaaaatatttgttgattcttttcatttctatctccttcttattttagttaatcaacataaataataatatacggattataatactaccgcagcaccactcctttcaaaatatatttaattaataatgctaaagcacatagttcttaatctttctcgattgatgcatcactagatttcttatgtcttttccaaatataaattccacctgcaatagacatcatagctccacctattaaaatgaaagatagaattcctttcccacctgtcatcggaataattccttttggtggaatatgcgtgttggtaattaaatgcttgtcaccttcctcatgatattcagaaatctgtttattaacagctattatattttgtatcgatcctttaacaacttcaaaagttaaaattggtttattagtaattttttgataatccttcggcgaaactgcttctattaactgatatttgccatctttcaaatctttgtaagaaattttgccgttttctcccgtcactacttttgaattattattttttattggtaaataaagtttataatcttcattaaattcttgaagttcaaatgtagctcctttgagaagcaacttattattatctttatcaacttttgtaaattcaatttcacctaacttcttctcgtttttaatcgttattgtaggatattctctcacatcacgaattttagggattggaaaatctctaagtgtatcgggttcctctgatttaggattcaatgttgttctaccattagtgtcatagaatttgttactaataaaactgtcatctagtttcacatcatatgtgagtgttactttttgcccctcccctaagttcaaacctctaacgtagagtttatttttgatgtattctaatttaacccctttaagtatcccaccatcattattaggccctccagttgcaatgctatctttcattatacttccatcatttccctgtaaagtataatcacttggttgcaatgtttgtccgttgccaagatgtaaattgattttatcacccataggatcttctatagttccattaacaattgagttttcctttgttaaaatcttttcaaattgttgctgaattttagataaaatttcattattagatacatcagctgaagttactatcggggtataatactcaggtttagaagagaatgaattcattagttctgttatttccccatctgaaagttcaaaagcttcctccttcaatttttgaaaagtaccatcttgatttttcttataatcctcattataaacttgtctaaaaccagatatatctataccaaaattaaagatgtcataatttttctgttttaaactatttatataaagtttggttggtgttccatgttctcttactggtccatttctataaattgtacctttagggtaattaagatttaaatctaaataatgaagtttttgtaagtttccagaaattatctgtgtttgataactatctaagggaaacaaaaagtaactctccccattgcctttgatcttttctggatcatcagttataaaataattatttttgtctaaataacctttttcttttattctctcaaattgatttgcgtatgttgaaccttttacaaaactattaatggcatatgatcttgttggaacaccgtcagttagatgaacaataatctttctactcttacgctgtatactacttaacaaggtatctgcctccataaaagctttcattgtaaaggtctcacctactttacttaaatcatattccctctttttttctggagttaatcctagacttgtccccccccacttagcttctggagcttctttagggatcttttttataatatcagcagcaatattagtgaactttttatagctataatcatttgtctgaactgtgaaactagtttcaagtccataataaggatcctctttaaaaccttttataactttaactgtccttccatcaaaaatatctgaaccataagtaactaaagctgctcggttttcaacatttgctcctaaaacatcttttataattgtttctactgcttcacctgccttttttgccttgttattttttccattattcttcatagaatttgaattatcaagaacaaaaacaacatccagaggttcatctttatttatagtttttattatggatttaccgctaacagttaactcaattttatatttattatgatccaaatcatttacttctgaaatacgtttagataatgttccctcttgaatttctcttatgtgctcaccttcacttgaatatggattaactgcttttgcctctaatttcccatttggaattgaatttttaacatgctcaagattataagattcttttgtatcttcataagctcctgtaaggggatactgcttatctagttcctcttgcctttgttcaattatagattttttatcatcactattttgtatcgtagtttttccattactctcaaccttaacttgccaagtctgggtagtctttttgtatccttcgggtgccgtttcttctgataaagtgtaatctccaggtgtgagattatcaaaagtagcttcacctgttacctcagtagttactttttctactttgctttctgagtgtgaagtaggttttaaaacaaaggtagcttttgaaagtggtttgttctggtcatctgtctttttaacaactaactttcctttagcaccattttccggtacggtactttcccctaaaacattggtattaagcggtatttgcgacaaacaaaaaagacttaacgtcaatattttagaaaatttttggtattttctcattttacaactcctattgtgccgaaatgtcgtttctaaatctaagatcagatacagaatatcctagaatatacaaactatcacttattatgatatcaataatttcttattataaggtatggaattttaaagttttttcccaatttttgaatgatttttctttttatttgataatcttattttttattatcttagaaatacttcaattagcttaagtagttgatttttctttttttatgttttaaaatattgcttaaaaataatgtttgagagagagtttactgaattgattgaaaattatttagaaaaagacatccttaatcaaataaaacttctaactttatgctatgattactacccttccattactctagacaaatcatgtcatcaacttggtttatctgaactacttattaggaaatattgtcatgatttaacaactttatttaacagtcaactctctctgaatatcgaaaagagtacaatagtctaccaatctaatggtgtaactagagaacaagctttcaaatatatttatcatcaatcacacgttttacaacttttaaaatttttgatcacgaatgattcaggcaggttacctttaacttactttagtgaaaaatttggactatcttgtgcaactgcttatcgcatacgaaaacatattagtccgttactagaaaaacttggatttcagattgtcaaaaatactattaccggtgacgagtatcgaattcgctatttaatcgcacatttaaatgctcgatttggtatagaagtttatcccttatctaagatggataaattgcttatcaaacgattgttattagaatactcaactacttttactgcttctcattacttcccmaatacatttattttctttgatacattattgtctctatcatggaaacgtattaattataatgtagttgtcccttactcaccccttttcattgaactacaaaatatatttatctatgatacattacaatattgtgtcaaaaatgttattatagattcctttaaaattaatttaaaaaaagacgatatagactatatttttcttgcttaccttacttcccataactctttttctaatccaaattggactgagaagcgtatcgataatgtaatagctattttcgaaaattatcccaaattccaaaaattattacagccactcaaagatgctcttcccttatctggctcctatcatgatgagttggtaaaagttgctatcttttttttccgaacatttattttaggattaaatcaattaatccctgaaacaatttcatttccttcatggaactatcatagacatgataaattaactactattctccgaccgataattacaaactggttaagtgaaattggagaatacacatttaaagaacaacattttcttctcctttgtactcatctagaaagaatcatcaaaaatcatattcctccgatacagatagccgtactaactacagactttattaataaccaaattttaacagaatgcttattacagagattttcttctaaaaagattcatttccacccttactatttattaactgatgatctttccaatattactaatcttaatccagacattattattaccaataaaaagctttctccctttatcaaacatgagatttcttcagagagtttaattacatatattgatctgattaatacttcagaccaaatcaatcaaatccaaaaaattatttcatcaatacaggaagaaaaatattgcaaactttttgcaaaaactaatgaaataactaatcgtagctcctataactcttaaaaattaacattaaaaagctagagcattgtgtaatgctctagctttttaatgttaatttttttgaataatataatccaacttttcaactgttttttcccatgtgaaatgttctttaattcttttagcaatattctgttgtagtttctctcttaatgccttatcttttactaataaatcaagagattcatggagtgactgagtattttcttccatgatgattcctaactcagggctatcaataacttcaactgttccaccgcgatctgttgcaataatagcacttgaaagtagaccagcttctaaaatagaggttggtaatccctctggatacattgaagggtaaacaaagatatcagtctgtgccattaaagacatagtctgttcaaagtttaatttccccaaaaagttaatctgtttggactgatatttctctttcaaatgtgctaattcaggtccgtctcctgcaatctgtaaataaacattttcagagtactgtgacatcgaaaatgcttctaagagcaattcaatgcctttttctttaataattctaccagcataagtgatgaaaatatcatcagcagatttttcaaggtaagccgtactagcaaaatcagagcctagactttcagataccgaattataaataactcctttagcttctatattaaaatgttttaaccattcaacgcttctcttggataccgcataaaaatctggacgataatgcttaacacgcgctgtgagaagatgttcatagatagctccaaagaaatctaaaaaacgattattgacagaaaaatgacttgacccatggtctaaaacaatactaggtaaatggtgcttctttgcaaaagatagcccttctagcgttgttaactgaaaacgtgtattacaaatcacaaaatcaatattttcatctgaaacatatttcatcagcgtgttgtattctcgatttttgttaataataggatagcgctgcttgacaatatttttggtcggtaaacggtaaatttttctacccttgtcttcatctataatcggtaaatcaccatgattagttgttacaataacaacacggtagccacgcttaaccaaatctgctgtcattttatctgtataacgttcaatacctccgaggaagggtagataatatcctgagaaaacagcaactgtttttaccttattttccatatttatccactttcatcaataagccatcttttaagcctttaatcatagcaactatttttttgctcttttgctcttctgctaccaacactcgaacaaattcatttcgcataaatactaaatatttgtatcgcttcttcttaccatatttttttataatatagatcgcattgcgtatcatgtaatattttcgaaatggtgaatgattcaatacatgaaaaacatggccaaattttttaactcgtgaagagtgtccaatttcgtgtaaaagaccaataaaattaacctgataagtcttatatcccatctctgacagacgataattcatttcagagtcaacaaaatcaataaacatctcttctgcaaagccagatgtttcttcaaaaacgctcgttttcattaaagcagccgaagtaatacactcttcaatttctttatagtcaaattcttgcataactaaatcttcacggttcatatcttgatacaaacaagataacataccgaccttaggtaaaagaaggtaattttcataattatctatcaaatcacctaggacaaccgaatcttgatctaaagtcaagaaccaatcaaattcttgtgctactgcaaattgaccgatacagttcaaagcatatgcaattcctttattttctgttaaataatcaacagttaggtgcccctcttcattataatcggccactaattgagaaatttcttccttatttttcgagccattatctacgatgtagatatggcttacttgaggataaattgctcgaatgttctgatctaagcgttcaatattggggttaaaggtgacaatacccgctaaatatttcatgttctgtgctcttttctaaaatctctaaataactgaatgactggtgctttggttataaaaacgataccgacatagatagttactgctactaaactttgaatgacataatttaccaatgatactgacatttgagtattgatataataaagtacagctccactaagagtagcagcaattaaatagcgcagcattcctcttgttaattctttaaaagtaaatacatctcttaaagagatagcttgatagagggagacaataaattcagtaataactgtagagataatagctcccatagcacctaaaattggtattaaaagtatattaagcacaacatttgccacaagtccaataactgcagacattgtgtaagcttttgtacgtcttgaagccagtagatactgtgtccctaaagcgttaccataagaaatgcaaatgatcatcaaagactcaacagccattagcggaccgacagcttcataccctttcccaaaaaagaagacggcaaa

SEQ ID NO: 486 - DNA, 14141 bp, Streptococcus agalactiae
gttgcttcataagttgtctgaaggcctaattctaaagtcacatgcattctttcagaaagttcagcgagatagtatatagtttcatcaggtaagcaatccggccttgttccgatgttgatctccgataactcctggctcattaatagcctgttcgtaacgctctttaattatctctaacttagcatgggtattggtaaaattttgaaaatagactaagtatttattaacctcgggccactttctatgcatgaaatcaatttctttatagaattgttcacgaataggagcttctggagcaactatagcatcccctgaaccagaaactgtgcaaaaagtgcatcctcctctagcaactgttccgtctctgttaggacagtcaaaaccagcatctataggtaatttaaatattttttctccaaagagttctcgataataatcattaatcgcacgataacgttttttcataggataattgtatcacaattttaactaaaataacctcactactacaataaaacttaaaaagattggaacgtcagttagtcccaatcttttatttacttcactttctttaaccaatccttggctaaaaagatatacgcagttagattcaaaataccataagcaagtataaaaccagctaaaacatctgtcggaaaatgaacccctaggtaaatacgagataacccaattaaaaaaatgagcaaacccaaataaagtaccttggcacaacagtttccatatactcttaggcatatagtactgcaataaaataataatactcccaaatatcataaatgttcccatcgagtgcccactgggaaacgaatagccacctgcaaatactaaatgggttaaagttggtcttactctttgaaaaataagttttaaagaaagtatacatataccagagataatagcatttactgcgataaatctagcttgaggataccacttcttaaggtaacagaaagtgacgctcataatcgcaatagctatctggcttacagtattaccaatcacagtgattaacttgaaaaatcttgtagaaagatttggcaactgtcctctaacactttcttgaatgttttggtcaaatgcaattacagtgtcgggccaatatttgatgaccaatcctaaactgaaaaataagataatagcaataaatgcttgaataagtttactattttgacgagataacattagtctttttatatctttctaatattggcaaacaagccacgtaagttagatagaaaacaatcgaaattaaaattccctcaacgatattaaatggaataaccattgttaaaaggtaattgcctacaccaataaatgttctgatatcaaagttagcaaatatagcatacaaaggaatcgcaaagacatagttgagagctaccatagatacggtcaagctaactgtaccaaatagactagctttaataaaatcttttgcactctctctatttttccagaaaatagcgaaacttgctaaaaataaagctagagcaaccatattcatcggtaaaccgataaaggtttctggaccacgattagcaagtataacttttaaaagtgatcttaataagagtacaccataacttgatttcaaatcaaataaaataaaagcaactaacatcggaaggattgaaaaatcaacctttaaaaattctgctcctggtattaatggaaatgaaaccatcatcaatacaaaagataaggcagaaagaatggcgattgtcaccattttacgtgtatttgtcataaaaaaattcctccaatttaaataaattgaaagaagctccaaaggtaagcgtatgtacgcgaaaaaaacctttgtcttctcccatccagactttactgtcggttgtggaatctcaccacatcagctttcgctcgcggactgatgcttcacaactgacaaataagttggaagcgattaccgccggtcgggaattacaccctgccctgaagacacctatagcataacaaaaaaaacttgcaattgcaagttttttaattactaattagtagtagtgattaaaaatcatattaataccaaattactatgctgtatcgtttctttcagatttgctatttttagtttttcttaaaaagataaacaaaattcccaaaataatacaaccaagaattgtcagtcctccaccaataatcattcctgttttaggaagaaatgattgtggaaaaagcggttgtgatggtttaggatttgttggtggaggagtttctttttcgttttctacctctacttcctgtgttttattagcaactacagcaactacagcatccttcatagatatacggtaaccagttagtgcttttgcttctcgaaaaatatacttaccaggtaataaaccttcaacctcaatttctcccttatcatcagttactaatgaagtaatcccatcttgatcggtcgtaaatcgtccatttttaaagcgaactggctgattctggttatcgtataatacaaatattactcctgatagccttttctttatctttccttcttttgtatatttaataagttttaatcggcctgtttcaacttttcgcttaggatttatctgtaattgatttgataacttatcatctggtatttcaatataaaaaggtactattgttgaaacgctttgatcagctttataagcacgaccaaagtacgaaccatttgggagtgctatctttgtctgaccattagtatcagtaggagaagtcaagatactcttatacttctggttcaattcgctatctgtcatttggctcaataaatcaacttttaagttgtcagtcacagtccataaacgataagaaatcccctcctctgtagtatttggctgaagtcctatctgtgtgattgttagttgattaggggtatcagcatttacactggctaccgaaaaaaacgctaattgtaccaatcctaaaaagcaacatagtagaagtcctaaactttttctaatctttttcatttttgatttccctttctttttctctctttaaattttcgttttaaatataatagtaaagcgactaatataagaataactaggattgataagaggaaataaagtttatagtgtgtttgcaattctttcattaaatagttcttttctttaacaggaggtacatacttgattcgatgccctctaactagtaaacgatgtgaattaatcgaataaggtgtacatgttagcaaagtcgcataatccttacctttaacaaccaataatttagaaaaattatctggctttacaacacttatttgatcaaccttataggctaaaacttctttgatattatgaatataaaaaatttttccttttttaagtttatctaaatctgtaaataacttagctttaggtaagccgcgatgagctgtgataacagtatgtgaactttttccaccaattggcaaggaggttccttcaaggtgtcctgctcctttttcaagaacactactggtagtccccgcatagataggtaatttttgcttgatagacggtatatcaatatatccaatcatttcagtaatctcaagcatgtgggcgtattcagcaataccttttttttctttttcagtatagggatctgataggcggcttgggtccagtgttctattataagcttttgctaactcaaatcgtctattaatctctttagtatttaatttttgggtttgattatcaaagttagttacttgattattagctttaatattatagtaccaatttgaaataaaaggatatgaggttatcaaaagaccaactaagaacaatagtatcaggcctacattcatccatcgatttaaaacgaccgatttcttaaggtttttctgaaattttcctcccattatgattcaattccttttctaacacttgctaaacgatttttttgacgttgacgttttattaaccaaagtaaccaagcaataataactaaagatatatagaatagatatctataaatcgtgtttaaatgaccttcttttattaatttttcatcaataggacctttataagggatacgatgtccccttactaaaagtctgtgtgtattgatcataatcggggtgcaagttaataaggttgcataatcatgtccaggaacaaccaacaaatctgaaaagttatcgggtgtaacgacttttatctgatctacttgatatgctatcgtttcttttatgttttgaatataaaacttatctcctttttttaactttttaaggttagaaaagagttctttatctggaattcctgagtgcgctgttataacggtatgtgtgctatttcctccaattggaagagaggtaccttctaaatgccctgctcctttagatagaacttcttgacttgaacctgcaaatatagggagtttttgacctatcttaggaactgaaattgttccgattttttcacttacctctaacatacgggcgtactctgctacccccttttgaattcgttttttctcataaggatcttcaagatggacattatttaaagaatcattataagcttgtgctagagtcatacgacgattgatttctttctgactaagttttttagcagctctctcaaaatcctgtgtttgattattagattctatcgtatagtaaaaacgtgataccactggatacaataaaatagatagacctattagaaaaagaatgataaaaggaagatttgacttcttctttttttttgtttttttgttgatttttttagtcttcacgtcatctcctaaataatggctcttgcttatgatctaagagtacttctactgaaatacccttagatcataagcacagctttaactgtgcttatacatcatcaaagactagccttaagcttcctttgattggcgttttttcatgataactactgctccaagcataatgcttaaaccaataattgtgaaaagaattgtaccaataccacctgtttgtgggattgttacttttttgttttgtacttgtttggcatctttttttacaggttttttgttatctgcgttgtcagttttagccccttttctgtatgatgtttgatttacttcaaagtttatattacctgccaatttcgcatatcctgctggtgcttgtgtttcttccaggttgtaagtgcctttttccagacctgtaatttcaaattgaccttggtcgtttgaggtgtatttaatggctttatcagcctttttatctgttatccattcatatgcttttgttagctttaatgaaggcttcattgtaatctttttgtttttttttgatagtttcttttgctgtttttcctttttggcctttttgtttttttttagtcaagttgttataagctttgatagcttcatctaatgctattttagcagtttttgcagctgcctttttttgagcttttgcttgatctgctttacgtgccaggtattttccttctgagtttttcacaaggaattttgctcctgccaagcgttcagttttagcttgatttgttttgacaaatttctttccatgagtttccacttttggttctgttgggttgattggtgttgggttatttgagtttttgttgttgttgatggttactttaccattttttagttttatttcttttggagtgtagccggtaacacgttctgcgatgctgtatgttttggtattttctagacctgtgaatttacccgagtattttccaggtgttttggttttgttgctttttgtgaggtcgcttttacctttgtatgtttttgtttgtttttcttgcgcggtagttttatctttatctttcaatgtgtaagcaacgtttacatcattagttgtactttcttctgcccagtttttagtgacttttatttcttggtttgctggtgtaccttgttgttgtttcctttctttcgttggtttgttaccatagtccaatttgatatcattggtttctggattttcaatagttgtttggccgttcaccgtagctgtgtaagtgattttgatttcaatatcttttttttttgctgctttttctacttttgccagtccttttgctttgaattttagtgtgaaaccttggtcatctgttctgagtttgtagtttgtatccttaggaaaattttttgtatttcctgttgctttaaggttgttagttgaacccattgtcaaaccttttgtcattctatctgtccaaaccagttttttgtattttgagcctttgtgaatttttgttttaactttgtattgtttttttttaccgattttcgctgtggcagttgctttgtcacgtgcataattaccataatttgcgccagctgtcaaaagtctattttcgtttgtcagtgttgtcaagttgtttgtcttttgcaaagtttttatctatttgtggttttttttcagtgttctttggataaatgtgggcatctttaacaacaccttgtttgtttaccaatggcagagtgattttaactggaactgcttttgaatcagccaggatggaaccgttgttgttgtagtttgatttttctttcacttcaacgattttgtactttccttttaattttttggtgttgaaagcaagtccagtgtctttttttggtgttgatccaggcacggcctcatctttattttcttttgtttccggagtatcgtctttcttaattaaggctggtgttaatttgttaccttctttttccttaatgtattgcattttaccagttttattttttttcaaagctaaagcaaagaacgcacctttgatttctttagcttcgtttgagccaaagtaagctttaaggtcattaatttgtttacctttgtagtctttttcgttcttaccttttgttccttgggagttacttttgttaagttttgcttgtgttttgacaatcttgtgcaaggtcactgtattagttgttgcttcgtccgcaaacgctggtgcaactgagagtagtgacgttaaggtcagtagcagtgtcgagaacattgtaagatatttgttgatttttttcatttctatctccttcttattttagttaatcaacatggttaataatatgcggattttaatattaccgcagcaccactcctttcaagtcatggaattttatttaattaattaagaatactaaagcgcatgatttttaatctttttttctggatatatcactagatttcttatatcttttccaaatataaattccacctgcaatagacatcatagctccacctattaaaatgaaagatagaattcctttcccacctgtcatcggaataattccttttggtggaatatgcgtgttggtaattaaatgcttgtcaccttcctcatgatattcagaaatctgtttattaacagctattatattttttatcgatcctttaaccacttcaaaagttaaaattggtttattagtaattttttgataatccttcggcgaaactgcttctattaactgatatttgccatctttcaaatctttgtaagaaattttgccgttttctcccgtcactacttttgaattattattttttattggtaaataaagtttataatcttcattaaattcttgaagttcaaacgtagctcctttgagaagcaacttattattatctttatcaacttttgtaaattcaatttcacctaacttcttctcgtttttaatcgttattgtaggatattctctcacatcacgaattttagggattggaaaatctctaagtgtattaggatcctctgatttaggattcaatgttgttctaccattagtgtcatagaatttgttacttataaaactgtcatctagtttcacatcatatgtgagtgttactttttgtccttctcctaagttcaaacctctaacgtagagtttatttttgatgtattctaatttaacccctttaagtattccaccatcattattaggcccaccagttgcaatgctatctttcattatacttccatcatttccctgtaaagtataatcacttggttgtaatgtttgtccgttgccaagctgtaaattgattttgtcacccataggatcttctatagttccattaacaattgagttttcttttgttaaaatcttttcaaattgttgctgaattttagataaaatttcattgttagatgtatcggctgaagttactatcggggtgtagtactcaggtttggaagagaatgacttcattagttctgttatttctccatctgaaagtttaaaagcttcctctttcaatttttgaaaagtaccatcttgatttttcttatactcctcattataaacttgtctaaaagcagatatatctataccaaaattaaagatgtcataatttttctgttttaaactatttatataaagtttggttggtgttccatgttcttttactggtccatttcgataaattgtacctttagggtaattaagatttaaatctaaataatgaagtttttgtaagtttccagagattatctgtgtttgataactatctaagggaaacaaaaagtaactctccccatttccttttatatcctcgggcttatcagtaagtagaaaattacttttatttagatatccattttttttcatttgttcaaattggctttcatatgatgcacccagtttaaaattattaatagcatatgatcttgttggaacaccatcagttatatgaacaataattttttgactatttcgatctacttgactcaaaatatcatctgcctccatgaaggctttcatagtaaatgtttctcctactttactaagatagtactgcttttgttgctctggagttagtccgtttgtagttgatccccatttagctttaggagcttctgtcggaatcctttttataatctcttcagcattatttgttaattgtttatgactataattctctgtctgaattgtgaacttagtttgaaggccataatatttatcatcttctttaaattcttttacgacatctacactcctaccatcaaaaatatctgaaccataggtaactaatgcaaccctattatcactgtttgctcctaaaatatcttttactgcggtcccaagagcttcggcagctttcttggctttattatgcctttgaaaatttgggccatcgttattcattgagttagaattatcgagtacgaagacaacatctaacggcttttgtttgtccactggttttactatggtttttccactgacagttaactcaattttatatttattatgagctaaatcacctacttctgaaatacgtttagataatgttccctctggaatttctcttatatgctcaccttcacttgaatatgggttaactgcttttgcctctgactttccatttggaactgaacctttaacatgctcaagtttataagattcctttgtatcttcataaattcctgtggggggatactgcttatctagttcttcgtgattttgtccaattgtggaatttttatcaccactattttgtatcgtagtttttccattactctcaaccttaacttgccaagtctggttagtctttttataaccttcgggcgctgtttcttctgataaagtataatctccaggtatgagattatcaaaagtagcttcacctgttagctcagcagttactttttctattttactttctggatgagcagtagtttttaaaacaaaggtagcttttgaaagtggtttgttctggtcatctgtctttttaacaactaactttcctttagcaccattttccggtacggtactttcccctaaaacattggtattaagcggtatttgcgacaaacaaaaaagacttaacgtcaatattttagaaaatttttggtattttctcattttacaactcctattgtgccgaaatgtcgtttctaaatctaagatcagatacagaatatcctagaatatacaaactatcacttattatgatatcaataatttcttattataaggtatggaattttaatgttttttcccaatttttgaatgatttttctttttatttgataatcttattttttattatcttagaaatatttcaattagcttaagtagttgatttttctttttttatgttttaaaatattgcttaaaaataatgtttgagagagagtttactgaattgattgaaaattatttagaaaaagacatccttaatcaaataaaacttctaactttatgctatgattactacccttccattactctagacaaatcatgtcatcaacttggtttatctgaactacttattaggaaatattgtcatgatttaacaactttatttaacagtcaactctctctgaatatcgaaaagagtacaatagtctaccaatctaatggtgtaactagagaacaagctttcaaatatatttatcatcaatcacacgttttacaacttttaaaatttttgatcacgaatgattcaggcaggttacctttaacttactttagtgaaaaatttggactatcttgtgcaactgcttatcgcatacgaaaacatattagtccgttactagaaaaacttggatttcagattttcaaaaatactattaccggtgacgagtatcgaattcgctatttaatcgcatttttaaatgctcgatttggtatagaagtttatcccttgtctaagatggataaattgcttatcaaacgattgttattagaatactcaactacttttactgcttctcattacttcccaaatacatttattttctttgatacattgttgtctctatcatggaaacgtattaattataatgtagttgtcccttactcaccccttttcattgaactacaaaatatatttatctatgatacattacaatattgtgtcaaaaatgttattatagattcctttaaaattaatttaaaaaaagacgatatagactatatttttcttgcttaccttacttcccataactctttttctaatccaaattggactgagaagcgtatcgataatgtaatagctattttcgaaaattatcccaaattccaaaaattattacagccactcaaagatgctcttcccttatctggctcctatcatgatgagttggtaaaagttgctatcatttttttccgaacatttattttaggattaaatcaattaatccctgaaacaatttcatttccttcatggaactatcatagacatgataaattaactactattctccgaccgataattacaaattggttaagtgaaattggagaatacacgtttaaggaacaacattttcttctcctttgtgctcatctagaaagaattatcaaaaatcatattcctccgatacagatagccgtactaactacagactttattaataaccaaattttaacagaatgtttattacagaggttttcttctaaacagattcatttccacccttactatttattaactgatgatctttccaatattactaatcttaatccagatattattattaccaatccaaagctttcttcctttatcaaacatgagatttcttcagagagtttaattacatatattgatttgattcatacttcagaccagatcaatcaaatccaagaaattatttcatcaatacaggaagaaaaatattgtaaactttttgcaaaaactaatgaaataactactcgtagctcctataactcttaaaaattaacattaaaaagctagagcattgtgtaatgctctagctttttaatgttaatttttttgaataatataatccaacttttcaactgttttttcccatgtgaaatgttctttaattcttttagcaatattctgttgtagtttctctcttaatgccttatcttttactaataaatcaagagattcatggagtgactgagtattttcttccatgatgattcctaactcagggctatcaataacttcaactgttccaccgcgatctgttgcaataatagcacttgaaagtagaccagcttctaaaatagaggttggtaatccctctggatacattgaagggtaaacaaagatatcagtctgtgccattaaagacatagtctgttcaaagtttaatttccccaaaaagttaatctgtttggactgatatttctctttcaaatgtgctaattcaggtccgtctcctgcaatctgtaaataaacattttcagagtactgtgacatcgaaaatgcttctaagagcaattcaatgcctttttctttaataattctaccagcataagtgatgaaaatatcatcagcagatttttcaaggtaagccgtaccagcaaaatcagagcctagactttcagataccgaattataaataactcctttagcttctatattaaaatgttttaaccattcaacgcttctcttggataccgcataaaaatctggacgataatgcttaacacgcgctgtgagaagatgttcatagatagctccaaagaaatctaaaaaacgattattgacagaaaaatgacttgacccatggtctaaaacaatactaggtaaatggtgattctttgcaaaagatagcccttctagcgttgttaactgaaaacgtgtattacaaatcacaaaatcaatattttcatctgaaacatatttcatcagcgtgttgtattctcgatttttgttaataataggatagcgctgcttgacaatatttttggtcggtaaacggtaaatttttctacccttgtcttcatctataatcggtaaatcaccatgattagttgttacaataacaacacggtagccacgcttaaccaaatctgctgtcattttatctgtataacgttcaatacctccgaggaagggtagataatatcctgagaaaacagcaactgtttttaccttattttccatatttatccactttcatcaataagccatcttttaagcctttaatcatagcaactatttttttgctcttttgctcttctgctaccaacactcgaacaaattcatttcgcataaatactaaatatttgtatcgcttcttcttaccatatttttttataatatagatcgcattgcgtatcatgtaatattttcgaaatggtgaatgattcaatacatgaaaaacatggccaaattttttaactcgtgaagagtgtccaatttcgtgtaacagaccaataaaattaacctgataagtcttatatcccatctctgacagacgataattcatttcagagtcaacaaaatcaataaacatctcttctgcaaagccagatgtttcttcgaaaacgctcgttttcattaaagcagccgaagtaatacactcttcaatttctttatagtcaaattcttgcatcactaaattttcacggttcatatcttgatacaaacaagataacataccgaccttaggtaaatgaaggtaattttcataattatctatcaaatcacctaggacaaccgaatcttgatctaaagtcaagaaccaatcaaattcttgtgctactgcaaattgaccgatacagttcaaagcatatgcaatccctttattttctgttaaataatcaacagttaggtgcccctcttcattataatcggctactaattgagaaatttcttccttatttttcgagccattatctacgatatagatgtggcttacttgaggataaattgctcgaatgttctgatctaagcgttcaatattggggttaaaggtgacaatacccgctaaatatttcatgttctatgctcttttctaaaatctctaaataactgaatgactggtgctttggttataaaaacgataccgacatagatagttactgctactaaactttgaatgacataatttaccaatgatactgacatttgagtattgatataatagagtacagctccactaagagtagcagcaattaaatagcgcagcattcctcttgttaattctttaaaagtaaatacatctcttaaagagatagcttgatatagggagacaataaattcagtaataactgtagagataatagctcccatagcacctaaaattggtattaaaagtatattaagcacaacatttgccacaagtccaataactgcagacattgtgtaagcttttgtacgtcttgaagccagtagatactgtgtccctaaagcgttaccataagaaatgcaaatgatcatcaaa

SEQ ID NO: 487 - DNA, 14000 bp, Streptococcus agalactiae; identical to SEQ ID NO: 481

SEQ ID NO: 488 - DNA, 14000 bp, Streptococcus agalactiae
gttgcttcataagttgtctgaaggcctaattctaaagtcacatgcattctttcagaaagttcagcgagatagtatatagtttcatcaggtaagcaatccggccttgttccgatgttgatcccgataactcctggctcattaatagcctgttcgtaacgctctttaattatctctaacttagcatgggtattggtaaaattttgaaaatagactaagtatttattaacctcgggccactttctatgcatgaaatcaatttctttatagaattgttcacgaataggagcttctggagcaactatagcatcccctgaaccagaaactgtgcaaaaagtgcatcctcctctagcaactgttccgtctctgttaggacagtcaaaaccagcatctataggtaatttaaatattttttctccaaagagttctcgataataatcattaatcgcacgataacgttttttcataggataattgtatcacaattttaactaaaataacctcactactacaataaaacttaaaaagattggaacgtcagttagtcccaatcttttatttacttcactttctttaaccaatccttggctaaaaagatatacgcagttagattcaaaataccataagcaagtataaaaccagctaaaacatctgtcggaaaatgaacccctaggtaaatacgagataacccaattaaaaaaatgagcaaacccaaaataccttggcacaacagtttccatatactcttaggcatatagtactgcaataaaataataatactcccaaatatcataaatgttcccatcgagtgcccactgggaaacgaatagccacctgcaaatactaaatgggttaaagttggtctcactctttgaaaaataagttttaaagaaagtatacatataccagagataatagcatttactgcgataaatctagcttgaggataccacttcttaaggtaacagaaagtgacgctcataatcgcaatagctatctggcttacagtattaccaatcacagtgattaacttgaaaaatcttgtagaaagatttggcaactgtcctctaacactttcttgaatgttttggtcaaatgcaattacagtgtcgggccaatatttgatgaccaatcctaaactgaaaaataagataatagcaataaatgcttgaataagtttactattttgacgagataacattagtctttttatatctttctaatattggcaaacaagccacgtaagttagatagaaaacaatcgaaattaaaattccctcaacgatattaaatggaataaccattgttaaaaggtaattgcctacaccaataaatgttctgatatcaaagttagcaaatatagcatacaaaggaatcgcaaagacatagttgagagctaccatagatacagtcaagctaactgtaccaaatagactagctttaataaaatcttttgcactctctctatttttccagaaaatagcgaaacttgctaaaaataaagctagagcaaccatattcatcggtaaaccgataaaggtttctggaccacgattagcaagtataacttttaaaagtgatcttaataagagtacaccataacttgatttcaaatcaaataaaataaaagcaactaacatcggaaggattgaaaaatcaacctttaaaaattctgctcctggtattaatggaaatgaaaccatcatcaatacaaaagataaggcagaaagaatggcgattgtcaccattttacgtgtatttgtcataaaaaaattcctccaatttaaataaattgaaagaagctccaaaggtaagcgtaggtacgcgaaaaaaacctttgtcttctcccatccagactttactgtcggttgtggaatctcaccacatcagctttcgctcgcggactgatgcttcacaactgacaaataagttggaagcgattaccgccggtcgggaattacaccctgccctgaagacacctatagcataacaaaaaaaacttgcaattgcaagttttttaattactaattagtagtagtgattaaaaatcatattaataccaaattactatgctgtatcgtttctttcagatttgctatttttagtttttcttaaaaagataaacaaaattcccaaaataatacaaccaagaattgtcagtcctccaccaataatcattcctgttttaggaagaaatgattgtggaaaaagcggttgtgatggtttaggatttgttggtggaggagtttctttttcgttttctacctctacttcctgtgttttattagcaactacagcaactacagcatccttcatagatatacggtaaccagttagtgcttttgcttctcgaaaaatatacttaccaggtaataaaccttcaacctcaatttctcccttatcatcagttactaatgaagtaatcccatcttgatcggtcgtaaatcgtccatttttaaagcgaactggctgattctggttatcgtataatacaaatattactcctgatagccttttctttatctttccttcttttgtatatttaataagttttaatcggcctgtttcaacttttcgcttaggatttatctgtaattgatttgataacttatcatctggtatttcaatataaaaaggtactattgttgaaacgctttgatcagctttataagcacgaccaaagtacgaaccatttgggagtgctatctttgtctgaccattagtatcagtaggagaagtcaagatactcttatacttctggttcaattcgctatctgtcatttggctcaataaatcaacttttaagttgtcagtcacagtccataaacgataagaaatcccctcctctgtagtatttggctgaagtcctatctgtgtgattgttagttgattaggggtatcagcatttacactggctaccgaaaaaaacgctaattgtaccaatcctaaaaagcaacatagtagaagtcctaaactttttctaatctttttcatttttgatttccctttctttttctctctttaaattttcgttttaaatataatagtaaagcgactaatataagaataactaggattgataagaggaaataaagtttatagtgtgtttgcaattctttcattaaatagttcttttctttaacaggaggtacatacttgattcgatgccctctaactagtaaacgatgtgaattaatcgaataaggtgtacatgttagcaaagtcgcataatccttacctttaacaaccaataatttagaaaaattatctggctttacaacacttatttgatcaaccttataggctaaaacttctttgatattatgaatataaaaaatttttccttttttaagtttatctaaatctgtaaataacttagctttaggtaagccgcgatgagctgtgataacagtatgtgaactttttccaccaattggcaaagaagttccttcaaggtgtcctgctcctttttcaagaacactactggtagtccccgcatagataggtaatttttgcttgatagacggtatatcaatatatccaatcatttcagtaatctcaagcatatgggcgtattcagcaataccttttttttctttttcagtatagggatctgataggcggcttgggtccagtgttctattataagcttttgctaactcaaatcgtctattaatctctttagcatttaatttttgggtttgattatcaaagttagttacttgattattagctttaatattatagtaccaatttgaaataaaaggatatgaggttatcaaaagaccaactaagaacaatagtatcaggcctacattcatccatcgatttaaaacgaccgatttcttaaggtttttctgaaattttcctcccattatgattcaattccttttctaacacttgctaaacgatttttttgacgttgacgttttattaaccaaagtaaccaagcaataataactaaagatatatagaaaagatatctataaatcgtgtttaaatgaccttctttcattaatttttcatcaataagacctttataaggaatacgatgtccccttactaaaagtctgtgtgtattgaccataatcggggtgcaagttaataaggttgcataatcatgtccaggaacaaccaacaaatctgaaaagttatcgggtgtaacgacttttatctgatctacttgatatgctatcgtttcttttatgttttgaatataaaacttatctcctttttttaactttttaaggttagaaaagagttctttatctggaattcctgagtgcgctgttataacggtatgtgtgctatttcctccaattggaagagaagtaccttctaaatgccctgctcctttagatagaacttcttgacttgaacctgcaaatatagggagtttttgacctatcttaggaactgaaattgtgccgattttttcacttacctctaacatacgggcgtactctgctacccccttttgaattcgttttttctcataaggatcttcaagatggacattatttaaagaatcattataagcttgtgctagagtcatacgacgattgatttctttctgactaagttttttagcagctctctcaaaatcctgtgtttgattattagattctatcgtatagtaaaaacgtgataccactggatacaataaaatagatagacctattagaaaaagaatgataaaaggaagatttgacttcttctttttagtttttttgttgatatttttagtcttcacgtcatctcctaaataatggctcttgcttatgatctaagagtacttctactgaaatacccttagatcataagcacagctttaactgtgcttatacaccatcaaagactagccttaagcttcctctgattgacgttttttcatgacaactactgctccaagcataatgcttaaaccaataattgtgaaaagaattgtaccaataccacctgtttgtgggatggttacttttttgttttgaacttgttgggcatctttttttacagatcctttatcatatgcgatgtcagttgtagcccctttgctatatgatgtggcagttacttcaaagtttacatcacctgacaatgtcgcataacctgctggtgcttgagtttcttccaagctataagtgcctttatccaaaccagtaatttcaaattgaccaccggcgttagagatcaatttaacaacattatcagcctttttatctgcaacccattcatatgagtagttagctttaacaaaagcgtcattgtaagctttttgtttttgatcaacagtagccaatgctgttttaccttcttggccttcttgtttttctttagtcaagtcgttataagctttaacagcttcatccaatgctagtttagcagtttttacagctgcctttgcttcagcagttgctgcacctgctttacgtgccaagtattttccttctttcttaacaaggaaggtagctcctgccaagcgttcagtgttagcttgatttgttttcacaaatttacgtccataagtcaccacttttggttctgatgggttgattggagttggatcatttgagtttttgttgttcttgatagtcacaacaccatttttaaatgatacatattctggagtgtagccgctaacacgttcgacaacgcggtaagttttagtattatccaaacctgtgaaagtatgttcaaagcgtgatggttttgttgcttcgtgtgaagcaacgttcacccatgtaccatccgtttgtttttcttgcaaggtaaagatagctttaactgcaacattaacatcagtaattgtaccatctactgcccagtctttaatgactttaatttcttggttagctggagtaccttcttgtggttcactttcttccgttgggttattaccatagtccaatttaacatcattggtttctggaacttcaacagtagtggagccgttcaccgtagctgagtaagtgatcttgatttcaacatctttgtcttttgcagcagctgctactgctgcaagacctgttgcattcaaggcaagacggaaaccttggtcatctgttacgagtttgtagtttaaaacaggaaaatctttaccatccaatgttactttaacgttgttgttgaacgtcaaacctttagtcatgctatcagtccaaaccagtttcttatagtctgagcctttaagaatttttgttccaactatgtattcttttttgtcaccaactgtcgctgagacaacacctttgtcttttcggttgtcagtataatcaagatctttatctgcaaagttcttatctacttgtggttttgtttcagtattctttggataaatgtgagcatctttaacaacaccttggttgtttaccaatggcagagtgattttaactggaactgcttttgaatcagccaagatagaaccgttgttatcgtagtttgatttttctttcaattcaacgatttggtaagttccttttaacttagcagtgttaaaagcaaaaccagtgtcttttgttaaccctgaaagaacagcaccaccttcagcatctttagcttccaaagtatcgacttccttaccattttcagtaatgaattttgtaccagtttcatttttgaaaacaaagaaagcacccttaatttctttagcatcggttgagccaaaataagatttaaggtcattaatttgtttaccaacataatcgctatcattcttaccttttgtaccttcagtaaagttatcaaatgcagcttgtggcatgacaatcttgtgcaaggtcacagtatcagttgttacgtcgtccgcaaacgctggtgcaactgagaatagtgacgttaagatcaatagcagtgtcgagaacactgtaagacatttgttgatttttttcatttctatctccttcttattctagttaatcaacatagataataatatacggattataatattaccgcagcaccactcctttcgaattatatttaattaattaagaatactaaaacacatgattcttaatctttttctctagatatatcactagatttcttatatcttttccaaatataaattccacctgcaatagacatcatagatccacctattaaaatgaaagatagaattcctttcccacctgtcatcggaataattccttttggtggaatatgcgtgttggtaattaaatgcttgtcaccttcctcatgatattcagaaatctgtttattaacagctattatattttgtatcgatcctttaacaacttcaaaagttaaaattggtttattagtaattttttgataatccttcggcgaaactgcttctattaactgatatttgccatctttcaaatctttgtaagaaattttgccgttttctcccgtcactacttttgaattattattttttattggtaaataaagtttataatcttcattaaattcttgaagttcaaacgtagctcctttgagaagcaacttattattatctttatcaacttttgtaaattcaatttcacctaacttcttctcgtttttaatcgttattgtaggatattctctcacatcacgaattttagggattggaaaatctctaagtgtattaggatcctctgatttaggattcaatgttgttctaccattagtgtcatagaatttgttacttataaaactgtcatctagtttcacatcatatgtgagtgttactttttgtccctcccctaagttcaaacctctaacgtagagtttatttttgatgtattctaatttaacccctttaagtattccaccatcattattaggcccaccagttgcaatgctatctttcattatacttccatcatttccctgtaaagtataatcacttggttgcaatgtttgtccgttgccaagctgtaaattgattttgtcacccataggatcttctatagttccattaacaattgagttttcttttgttaaaaccttttcaaattgttgctgaattttagataaaatttcattgttagatgcatcggatgaagttactatcggggtataatactcaggtttagaagagaatgacttcattagttctgttatttccccatctgaaagttcaaaagcttcctctttcaatttttgaaaagtaccatcttgatttttcttataatcctcattataaacttgtctaaaagcagatatatctataccaaaattaaagatgtcataatttttctgttttaaactatttatataaagtttggttggtgttccatgttctcttactggtccatttcgataaattgtacctttagggtaattaagatttaaatctaaataatgaagtttttgtaagtttccagagattatctgtgtttgataactatctaagggaaacaaaaagtaactctccccatttccttttatatcctcgggcttatcagtaagtagaaaattacttttatttagatatccattttttttcatttgttcaaattggctttcatatgatgcacccaatttaaaattattaatagcatatgatcttgttggaacaccatcagttatatgaacaataattttttgactatttcgatctacttgactcaaaatatcatctgcctccatgaaggctttcatagtaaatgtttcccctactttactaagatagtactgcttttgttgctctggagtaagtccgtttgtagttgatccccatttagctctaggagcttctgtaggaatcctttttataatctcttcagcattatttgttaattgtttatgactataattctctgtctgaattgtgaacttagtttgaaggccataatatttatcatcttctttaaatccttttacgacatctacactcctaccatcaaaaatatctgaaccataggtaactaatgcaaccctattatcactgtttgctcctaaaatatcttttactgcggtcccaagagcttcggcagctttcttggctttattatgcctttgaaaatttgggccatcgttattcattgagttagaattatcgagtacgaagacaacatctaacggcttttgtttgtccactggttttactatggtttttccactgacagttaactcaattttatatttattatgagctaaatcacctacttctgaaatacgtttagataatgttccctctggaatttctcttatatgctcaccttcacttgaatatgggttaactgcttttgcctctgactttccatttggaactgaacctttaacatgctcaagtttataagattcctttgtatcttcataaattcctgtggggggatactgcttatctagttcttcgtgattttgtccaattgtggaatttttatcaccactattttgtatcgtagtttttccattactctcaaccttaacttgccaagtctggttagtctttttataaccttcgggcgctgtttcttctgataaagtataatctccaggtatgagattatcaaaagtagcttcacctgttagctcagcagttactttttctattttactttctggatgagcagtagtttttaaaacaaaggtagcttttgaaagtggtttgttctggtcatctgtctttttaacaactaactttcctttagcaccattttccggtacggtactttcccctaaaacattggtattaagcggtatttgcgacaaacaaaaaagacttaacgtcaatattttagaaaatttttggtattttctcattttacaactcctattgtgccgaaatgtcgtttctaaatctaagatcagatacagaatatcctagaatatacaaactatcacttattatgatatcaataatttcttattataaggtatggaattttaaagttttttcccaatttttgaatgatttttctttttatttgataatcttattttttattatcttagaaatacttcaattagcttaagtagttgatttttctttttttatgttttaaaatattgcttaaaaataatgtttgagagagagtttactgaattgattgaaaattatttagaaaaagacatccttaatcaaataaaacttctaactttatgctatgattactacccttccattactctagacaaatcatgtcatcaacttggtttatctgaactacttattaggaaatattgtcatgatttaacaactttatttaacagtcaactctctctgaatatcgaaaagagtacaatagtctaccaatctaatggtgtaactagagaacaagctttcaaatatatttatcatcaatcacacgttttacaacttttaaaatttttgatcacgaatgattcaggcaggttacctttaacttactttagtgaaaaatttggactatcttgtgcaactgcttatcgcatacgaaaacatattagtccgttactagaaaaacttggatttaagattttcaaaaatactattaccggtgacgagtatcgaattcgctatttaatcgcacatttaaatgctcgatttggtatagaagtttatcccttatctaagatggataaattgcttatcaaacgattgttattagaatactcaactacttttactgcttctcattacttcccaaatacatttattttctttgatacattattgtctctatcatggaaacgtattaattataatgtagttgtcccttactcaccccttttcattgaactacaaaatatatttatctatgatacattacaatattgtgtcaaaaatgttattatagattcctttaaaattaatttaaaaaaagacgatatagactatatttttcttgcttaccttacttcccataactctttttctaatccaaattggactgagaagcgtatcgataatgtaatagctattttcgaaaattatcccaaattccaaaaattattacagccactcaaagatgcccttcccttatctgactcctatcatgacgagttggtaaaagttgctatcattttttcccgaacatttattttaggattaaatcaattaatccctgaaacaatttcatttccttcatggaactatcatagacatgataaattaactactattctccgaccgataattacaaattggttaagtgaaattggagaatacacgtttaaggaacaacattttcttctcctttgtgctcacctagaaagaattatcaaaaatcacattcctccgatacaaatagccgtactaactacagactttattaataacaaaattttaacagaatgtttatcacagaggttttcttctaaacagattcatttccacccttactatttattaactgatgatctttccaatattactaatcttaatccagatattattattaccaacccaaagctttcttcctttataaaacatgagatttcttcagagagtttaattacatatattgatttgattcatactccagaccagatcaatcaaatccaagaaattatttcatcaatacaagaagaaaaatattgtaaactttttgcaaaaaacaatgaaataactacccgtagctcctataactcttaaaaattaacattaaaaagctagagcattgtgtaatgctctagctttttaatgttaatttttttgaataatataatccaacttttcaactgttttttcccatgtgaaatgttctttaattcttttagcaatattctgttgtagtttctctcttaatgccttatcttttactaataaatcaagagattcatggagtgactgagtattttcttccatgatgattcctaactcagggctatcaataacttcaactgttccaccgcgatctgttgcaataatagcacttgaaagtagaccagcttctaaaatagaggttggtaatccctctggatacattgaagggtaaacaaagatatcagtctgtgccattaaagacatagtctgttcaaagtttaatttccccaaaaagttaatctgtttggactgatatttctctttcaaatgtgctaattcaggtccgtctcctgcaatctgtaaataaacattttcagagtactgtgacatcgaaaatgcttctaagagcaattcaatgcctttttctttaataattctaccagcataagtgatgaaaatatcatcagcagatttttcaaggtaagccgtaccagcaaaatcagagcctagactttcagataccgaattataaataactcctttagcttctatattaaaatgttttaaccattcaacgcttctcttggataccgcataaaaatctggacgataatgcttaacacgcgctgtgagaagatgttcatagatagctccaaagaaatctaaaaaacgattattgacagaaaaatgacttgacccatggtctaaaacaatactaggtaaatggtgattctttgcaaaagatagcccttctagcgttgttaactgaaaacgtgtattacaaatcacaaaatcaatattttcatctgaaacatatttcatcagcgtgttgtattctcgatttttgttaataataggatagcgctgcttgacaatatttttggtcggtaaacggtaaatttttctacccttgtcttcatctataatcggtaaatcaccatgattagttgttacaataacaacacggtagccacgcttaaccaaatctgctgtcattttatctgtataacgttcaatacctccgaggaagggtagataatatcctgagaaaacagcaactgtttttaccttattttccatatttatccactttcatcaataagccatcttttaagcctttaatcatagcaactatttttttgctcttttgctcttctgctaccaacactcgaacaaattcatttcgcataaatactaaatatttgtatcgcttcttcttaccatatttttttataatatagatcgcattgcgtatcatgtaatattttcgaaatggtgaatgattcaatacatgaaaaacatggccaaattttttaactcgtgaagagtgtccaatttcgtgtaacagaccaataaaattaacctgataagtcttatatcccatctctgacagacgataattcatttcagagtcaacaaaatcaataaacatctcttctgcaaagccagatgtttcttcgaaaacgctcgttttcattaaagcagccgaagtaatacactcttcaatttctttatagtcaaattcttgcatcactaaattttcacggttcatatcttgatacaaacaagataacataccgaccttaggtaaatgaaggtaattttcataattatctatcaaatcacctaggacaaccgaatcttgatctaaagtcaagaaccaatcaaattcttgtgctactgcaaattgaccgatacagttcaaagcatatgcaatccctttattttctgttaaataatcaacagttaggtgcccctcttcattataatcggctactaattgagaaatttcttccttatttttcgagccattatctacgatatagatgtggcttacttgaggataaattgctcgaatgttctgatctaagcgttcaatattggggttaaaggtgacaatacccgctaaatatttcatgttctatgctcttttctaaaatctctaaataactgaatgactggtgctttggttataaaaacgataccgacatagatagttactgctactaaactttgaatgacataatttaccaatgatactgacatttgagtattgatataatagagtacagctccactaagagtagcagcaattaaatagcgcagcattcctcttgttaattctttaaaagtaaatacatctcttaaagagatagcttgatatagggagacaataaattcagtaataactgtagagataatagctcccatagcacctaaaattggtattaaaagtatattaagcacaacatttgccacaagtccaataactgcagacattgtgtaagcttttgtacgtcttgaagccagtagatactgtgtccctaaagcgttaccataagaaatgcaaatgatcatcaaa

SEQ ID NO: 489 - DNA, 8697 bp, Streptococcus agalactiae
tccacatcggtccaattaacatatgacgtggcgcatcaccagtaattcggtgaataacaatatgttttggaataatctccagttggtcacaaataatcgaaatatagtcttcttgacttaacaaacgtaaacgaccttcatggtaatctctctgcattcttgtattagtcataagatgcagaaggtgtaattttataccctgaatatcattatccgtaacacatcgacgaacattttccaccatcatatcatgtgtctcccctgggagaccatttattaggtgagaaacgatttctactttaggagctaattctcgtattctcttaacagtttttttgtaaaggtcatatgaatgtgctctatttattaatgcagaagttgcttcataagttgtctgaaggcctaattctaaagtcacatgcattctttcagaaagttcagcgagatagtatatagtttcatcaggtaagcaatccggccttgttccgatgttgatcccgataactcctggctcattaatagcctgttcgtaacgctctttaattatctctaacttagcatgggtattggtaaaattttgaaaatagactaagtatttattaacctcaggccactttctatgcatgaaatcaatttctttatagaattgttcacgaataggagcttctggagcaactatagcatcccctgaaccagaaactgtgcaaaaagtgcaccctcctctagcaactgttccatctctgttaggacagtcaaaaccagcatctataggtaatttaaatattttttctccaaagagttctcgataataatcattaatcgcacgataacgttttttcataggataattgtatcacaattttaactaaaataacctcactactacaataaaactaaaaaagattggaacgtcagttagttccaatcttttatttacttcactttctttaaccaatccttggctaaaaagatatacgcagttagattcaaaataccataagcaagtataaaaccagctaaaacatctgtcggaaaatgaacccctaggtaaatacgagataacccaattaaaaaaatgagcaaacccaatgtaccttggcacaacagtttccatatactcttaggcatatagtactgcaataaaataatactactcccaaatatcataaatgttcccatcgagtgcccactgggaaacgaatagccacctgcaaatactaaatgggttaaagttggtctcactctttgaaaaataagttttaaagaaagtatacatataccagagataatagcatttactgcgataaatctagcttgaggataccacttcttaaggtaacagaaagtgacgctcataatcgcaatagctatctggcttacagtattaccaaccacagtgattaacttgaaaaatcttgtagaaagatttggcaactgtcctctaacactttcttgaatagtttggtcaaatgcgattacagtgtcgggccaatatttgatgaccaatcctaaactgaaaaataagataatagcaataaatgcttgaataagtttactattttgacgagataacattagtctttttatatctttctaatattggcaaacaagccacgtaagttagatagaaaacaatcgaaattaaaattccctcaacgatattaaatggaataaccattgttaaaaggtaattgcctacaccaataaatgttctgatatcaaagttagcaaatatagcatacaaaggaatcgcaaagacatagttgagagctaccatagatacagtcaagctaactgtaccaaataaactagctttaataaaatcttttgcactctctctatttttccagaaaatagcgaaacttgctaaaaatagagctagagcaaccatattcatcggtaaaccgataaaggtttctggaccacgattagcaagtataacttttaaaagtgatcttaataagagtacaccataacttgatttcaaatcaaataaaataaaagcaactaacatcggaaggattgaaaaatcaacctttaaaaattctgctcctggtattaatggaaatgaaaccatcatcaatacaaaagataaggcagaaagaatggcgattgtcaccattttacgtgtatttgtcataaaaaaattcctccaatttaaataaattgaaagaagctccaaaggtaagcgtaggtacgcgaaaaaaacctttgtcttctcccatccagactttactgtcggttgtggaatctcaccacatcagctttcgctcgcggactgatgcttcacaactgacaaataagttggaagcgattaccgccggtcgggaattacaccctgccctgaagacacctatagcataacaaaaaaaacttgcaattgcaagttttttaatcactaattagtagtagattgtataatattaatttttaacatcaattaattgacagcgcactaatactctagctactcctgcctttgtacaagtaaacaagcttaagtcccaatcattgtctgatgtggcagttttataaactttttcaatcgctgttggttcaataatttctctattactgattttgtagtgatagatttgccctgttgtagttgtaaaataaacatccgttcccatatctacattttttaaagcatcaaaatgataaggaaaattatgcgcacaaatcaccatgttattagttaaataagaaccataataccttgtaggcgttttagacagttgttcaaaactataattagcagctaccggtaaatgcagttttaagttcggaatatccagagttcccaagtaatctgttttatccaacttttttacaggtaattctccattttctgaaccctttacttgatgcgtaatagatttatcaagcgccttgacaatatgctgagaagttaaatcagcttgatgcgcctgattaatattataccaaccccaatagattccagaacttaccagaatgattccgagtatcgctaaaaaatttgctgaatatcttctaatcacgtcttcttctccattttaaggctattattaaacacagaagtcctgacataattagtataggtattggccaccatacttgtccagtaaacgggagctttccctttgtctgatgtgttactgtaggagtaattgtctcttcttttttaggtttagcatttaaagggctcattttctcaaatgctgtaatatcgtacttcccatccttaggtattgatagtataaagggagacattagttcataaccttgagctgttttagtctgaataaatagataaatcccttgaggaagattgttcgcaacaataccttcagccggtaaattatcaaacgtttgtaaaggttgagttttatgaacagcttttgttagtagattgacgtatttggcttggttactatcaaggtttacttgtgttagatcatcgtcttttattccaataccttgaaatggggtagttagagtaaaaacttggttaccatcaacatctttagcttgtgctacttggtaaacaagtaaattaccgccagcgataccttgattattatacttattttgtatagtaatagaacccgttttcatctgatcattggtatcagcagacacaagttgagtacttagactaaataataagagaagagttatctttaggatctttttataaatcattgttctcttcctttctcattgcttgttttaaaattttcttacgttgacgtgctctcctagttacttctaaagagattaaaagtaaaatcaaagtaaggaaaatagcgataaatggtgcgatataaataggctctatttgtattgcctctgctactaccaaagcgttaccattatcgtttggtacacgatgtcctctcactagtaaccgatgggtattaacgccatatggtgtacacgtcaccaaagtttggtagtctttacctttaacaatttgtaaatccctcaaatcatccggtttaactgttctgatttgatccacttgataagtatatgtttcatttaagatactgactgtccagtggtctccagcttttaacttatccaaatcagaaaaaagccttgaagagggtaaacctctatgtcctgataaaatagaatgagttgagtctcctccaattggaagactacttccttctaaatgaccaatagaagtttgaagcactttttcacttgtaccatgataaagtggtaattttatgtttatctttggaattgaaatataacccatattacccgttttatcgatagccagttgtgaattataatccaaacgctcttggttagtcatgtgccacttcattcctgaagttttaaattgcttattatattctttggctcggttaataatttttttatagtcgttttcatccatatgcgttacgcggtcttggtaatccataatcgctcgagattggtgaaatgaattccaataattagcaagtgaaggataagccattaagcctacccccactgcaattatagtgacaagcaaaatggatactaaatgttgtcttatttttttcatatattttaaatctgtaccactttgctagcccatcttattaagaacgtaaacgacgacgagcaacaagcacgatacctgctcctattactaaaattgcacctataatgtagaaaattgttgtaccaataccacctgttgaaggcaactcagtacctttgttattttcaacagttgggttaactaaaaggttatctgaattagtcgtatcagtggctccatctcctaaaataaccttctgagagttatctaacaaattgtaacctaagggagcctttttctcaactagatagtatgtaccttctttcaagcctgtaatggtaattataccatctgctcctgttgtatattctgttgcattagcttctgtgccccattcaacgttatttgtatcgttaaagtttagaaattgacccgtagcattctttaaaacaaatatagcaccttgtaatgaagcttttgtggaaccatcaattttttttatagtaatttgaccatccctcactgttactttttgacctgggtcatcattgctagtattggggttgatggtcgcaatgtttgtattttctggtaaatcagctgaacctggtttagctccactctttaatactcctgtataagtgactgtgattgtatttattcccttataaaaaaagtcatcattagctccattttgagtatttccggttggagtattggtagctgcccacggaatagtaatcgtgaaattattattttcctctaacaggttatacttcccagttgctttttccgaaccttgagttagagttgtaatattccctgatccatcagtaatagttacttcataagatccttcgttcaaatcaactacagaagcagatggcatagtatcctttataacatattgatacactttttctgtaccatgataattgactgcattcttataagtaatagtatatttgactgtatcaccaaccgagtacgttttttgatctacagtttttccaccaccatctccccatgtcgcatcagtattcttttcatgaatagtagcatttggagttacagatgtaaccataattacagctccattattaacagtgctagaaacataataatatccatattgggaaacattaataacctcagtaccatcattatttgactcagtaacagtggaaactggtgtagtattagctgatatagatttagcccatgtcgcaatctcatttgctgacgcagtatcttttttagttacatatgttctccctccattagtagttgtcgtaaaaagagaattaaaatcagttgaagctttatactcagcttctttaccttgaggaattaaataagaagctccatctttattcgaatcagatacatttgcattatctatttctgcatcaaaaactttgtatgctttataggttgcgcctttttgagtatcttgaactgtaattgtccctgtctcagcggcaaaagctatcggcgtaactggtgatacagccataccaaatgctaaactcgccactaacagcgattgaatcattttctttttcattgaaatctttctcctaaaatcatattgatgaatgattaattcatattttttttcgatagtataatattaatcctgatggtagagctaaagctaaaccaactaggatataaatgtgtgttccaatacctccagtactaggcaattctgttcctttactgttagtaattttaaaagtatatactgtacttccatctactaaattctcttttattggtgtcgcattattaccattttgttcaaaggtaactcccgtagaaatcactaatactgatatatcatttttaggtagtaggtaccctggaggggcctttgtctctgttaggtagtattttcctactggcaaactgaggtagttattagcatccactaataacaagcctttatcgtttgtcaccagccctgaatacataggatgtgaagctttattcccattagcatctgattcataaatatcaaaaactgcacctgctaaaaaattattatcattttcgacattaactttctgtagtcgtactttttgcttgatacgtgtattggtaaagctaatatctacgtctcctgaaactgtcagggattgtaagccggtagcatcataagttttatcagcttcaccagttgctagatttttttctgtaattgactcagatactttaaattcatcgtaggcttgttcatctattgatatagaagttccataaggtactttaaattccttagtctgaccatctctcagcggaaaattctcttgttgcaacgtttcacttggattaaacaagaagtctttcgtcttatcttcatctagtccaacgacagttttacttactctgacggtgtattctttaggttgccaaacagcatataaggtatttgttgcatcagggttgttatcaatacctattgattgacctgctgtaaattccacacgtcctgtatcagctaaatccttatcatgatgccaaccaataaggttgtaacctgtccttgtaaagtattggttttcaggaattgtagttgtgctattcaactccatacgcggtgtctctacttgtgttaccacattaccattttctactctagtaccaccgttaccattgtatttgattgaggtatcttctaatttgatatctcctactggaataatgacaggttttatggtgatatttttattagcatctgctaaatgggcgtcaatatcaatggaatcatatgggttataaattttaccattgtaccaccagccacggaaacgatagccatctggcattgtcggacgtctcagtaaggctgaatgggagccatcgtcataggaatcagggtcagtaggctcattacttgtttgtaattgctgaccagaagcatccaatgctggctttccatctgtaccaacagcatcattgctgtatataatatgataatctccagcctttcgccaaatagctcttaaattgatatcttgagttacagcacctgaaaagttataaggtctaatactaccatctggattaacataataccaaccgactaatttgtaagcgtcttttacgtacttgtacttagttgttgtatcaacatttgagagactagtatctgtcgtataataggcatctttagttgagtcgggatctttatctcgtgaatcatacttataataatatgtacctgaaggatcttggatataatcccttgtaatatctgtataatccggaatacgatcaccataatgcaagtctaaataggtatcatctgtttttgataattggcctccgtttggatcaatattgacacgatatgttaccttttgccaacctgcatagactttaacatcatgaggaggcatagtcgtgttaaagtcaaatacttgtgtttgtgcttggtctttataccatttaccatcccaaacataccctggtcgactaggtttaggttgaaccgttgtcgtatcgggggcataagaggacaaattttgctcatatagaacatcctttactggaaaattaggaagctctgtattatcaagcggatctaaatatttaatcttgtatgaattacgttcataccataccactaagttcaaataatctttgtggtagtctccatatttatcgtagtattcatctgcgattggcacttttgtttttgcactcgtttgtcttgggttctgatcaaaatggtaattatctggatataagctttgatagtatttaacattaaatcctaggtatttttctgtaaaggtaaattcgtctgctccagcacctccccctgtgtctgctaaagagtatttgccatctagtccttgtttgtagaacggataattttgaattctctgaccttttggatagagttttatttcatctggatttgctgtatgtactccattgggtagtatgaactcacccaaataactcattccttatgttccagtttggttatttccaacattggttaggtaacgccatgcacctgtcttccattgatagccattcgcggctaaggttgtaccgtatagtcctgtgtaggtttcggcatctgatgctctagttctaggaatcgtagtattttggtaatgaatctccgagtagccctttaaacattaaca

SEQ ID NO: 490 - DNA, 13999 bp, Streptococcus agalactiae
tccacatcggtccaattaacatatgacgtggcgcatcaccagtaattcggtgaataacaatatgttttggaataatctccagttggtcacaaataatcgaaatatagtcttcttgacttaacaaacgtaaacgaccttcatggtaatctctctgcattcttgtattaatcataagatgcagaaggtgtaattttataccctgaatatcattatccgtaacacatcgacgaacattttccaccatcatatcatgtgtctcccctgggagaccatttattaggtgagaaacgatttctactttaggagctaattctcgtactctcttaacagtttttttgtaaaggtcatatgaatgtgctctatttattaatgcagaagttgcttcataagttgtctgaaggcctaattctaaagtcacatgcattctttcagaaagttcagcgagatagtatatagtttcatcaggtaagcaatccggccttgttccgatgttgatcccgataactcctggctcattaatagcctgttcgtaacgctctttaattatctctaacttagcatgggtattggtaaaattttgaaaatagactaagtatttattaacctcaggccactttctatgcatgaaatcaatttctttatagaattgttcacgaataggagcttctggagcaactatagcatcccctgaaccagaaactgtgcaaaaagtgcaccctcctctagcaactgttccatctctgttaggacagtcaaaaccagcatctataggtaatttaaatattttttctccaaagagttctcgataataatcattaatcgcacgataacgttttttcataggataattgtatcacaattttaactaaaataacctcactactacaataaaactaaaaaagattggaacgtcagttagtcccaatcttttatttacttcactttctttaaccaatccttggataaaaagatatacgcagttagattcaaaataccataagcaagtataaaaccagctaaaacatctgtcggaaaatgaacccctaggtaaatacgagataacccaattaaaaaaatgagcaaacccaatgtaccttggcacaacagtttccatatactcttaggcatatagtactgcaataaaataatactactcccaaatatcataaatgttcccatcgagtgcccactgggaaacgaatagccacctgcaaatactaaatgggttaaagttggtctcactctttgaaaaataagttttaaagaaagtatacatataccagagataatagcatttactgcgataaatctagcttgaggataccacttcttaaggtaacagaaagtgacgctcataatcgcaatagctatctggcttacagtattaccaaccacagtgattaacttaaaaaatcttgtagaaagatttggcaactgtcctctaacactttcttgaatagtttggtcaaatgcgattacagtgtcgggccaatatttgatgaccaatcctaaactgaaaaataagataatagcaataaatgcttgaataagtttactattttgacgagataacattagtctttttatatctttctaatattggcaaacaagccacgtaagttagatagaaaacaatcgaaattaaaattccctcaacgatattaaatggaataaccattgttaaaaggtaattgcctacaccaataaatgttctgatatcaaagttagcaaatatagcatacaaaggaatcgcaaagacatagttgagagctaccatagatacagtcaagctaactgtaccaaataaactagctttaataaaatcttttgcactctctctatttttccagaaaatagcgaaacttgctaaaaatagagctagagcaaccatattcatcggtaaaccgataaaggtttctggaccacgattagcaagtataacttttaaaagtgatcttaataagagtacaccataacttgatttcaaatcaaataaaataaaagcaactaacatcggaaggattgaaaaatcaacctttaaaaattctgctcctggtattaatggaaatgaaaccatcatcaatacaaaagataaggcagaaagaatggcgattgtcaccattttacgtgtatttgtcataaaaaaattcctccaatttaaataaattgaaagaagctccaaaggtaagcgtaggtacgcgaaaaaaacctttgtcttctcccatccagactttactgtcggttgtggaatctcaccacatcagctttcgctcgcggactgatgcttcacaactgacaaataagttggaagcgattaccgccggtcgggaattacaccctgccctgaagacacctatagcataacaaaaaaaacttgcaattgcaagttttttaatcactaattagtagtagattgtataatattaatttttaacatcaattaattgacagcgcactaatactctagctactcctgcctttgtacaagtaaacaagcttaagtcccaatcattgtctgatgtggcagttttataaactttttcaatcgctgttggttcaataatttctctattactgattttgtagtgatagatttgccctgttgtagttgtaaaataaacatccgttcccatatctacattttttaaagcatcaaaatgataaggaaaattatgcgcacaaatcaccatgttattagttaaataagaaccataataccttgtaggcgtttagacagttgttcaaaactataattagcagctaccggtaaatgcagttttaagttcggaatatccagagttcccaagtaatctgttttatccaacttttttacaggtaattctccattttctgaaccctttacttgatgcgtaatagatttatcaagcaccttgacaatatgctgagaagttaaatcagcttgatgcgcctgattaatattataccaaccccaatagattccagaacttaccagaataattccgagtatagctaaaaaatttgctgaatatcttctaatcacgtcttcttctccattttaaagctattattaaacacagaagtcctgacataattagtataggtattggccaccatacttgtccagtaaacggaagctttccctttgtctgatgtgttactgtaggagtaattgtctcttcttttttaggtttagcatttaaagggctcattttctcaaatgctgtaatatcgtacttcccatccttaggtattgatagtataaagggagacattagttcataaccttgagccgttttagtctgaataaatagataaatcccttgaggaagattgttcgcaacaataccttcagccggtaaattatcaaacgtttgtaaaggttgagttttatgaacagcttttgttagtagattgacgtatttggcttggttactatcaaggtttacttgtgttagatcatcgtcttttattccaataccttgaaatggggtagttagagtaaaaacttgattaccatcaacatctttagcttgtgctacttggtaaacaagtaaattaccgccagcgataccttgattattatacttattttgtatagtaatagaacccgttttcatctgatcattggtatcagcagacacaagttgagtacttagactaaataataagagaagagttatctttaggatctttttataaatcattgttctcttcctttctcattgcttgttttaaaattttcttacgttgacgtgctctcctagttacttctaaagagattaaaagtaaaatcaaagtaaggaaaatagcgataaatggtgcgatataaataggctctatttgtattgcctctgctactaccaaagcgttaccattatcgtttggtacacgatgtcctctcactagtaaccgatgggtattaacgccatatggtgtacacgtcaccaaagtttggtagtctttacctttaacaatttgtaaatccctcaaatcatccggtttaactgttctgatttgatccacttgataagtatatgtttcatttaagatactgactgtccagtggtctccaacttttaacttatccaaatcagaaaaaagccttgaagagggtaaacctctatgtcctgataaaatagaatgagttgagtctcctccaattggaagactacttccttctaaatgaccaatagaagtttgaagcactttttcacttgtaccatgataaagtggtaattttatgtttatctttggaattgaaatataacccatattacccgttttatcgatagccagttgtgaattataatccaaacgctcttggctagtcatgtgccacttcattcctgaagttttaaattgcttattatattctttggctcggttaataatttttttataatcgttttcatccatatgcgttacgcggtcttggtaatccataatcgctcgagattggtgaaatgaattccaataattagcaagtgaaggataagccattaagcctacccccactgcaattatagtgacaagcaaaatggatactaaatgttgtcttatttttttcatatattttaaatctgtaccactttgctagcccatcttattaagaacgtaaacgacgacgagcaacaagcacgatacctgctcctattactaaaattgcacctataatgtagaaaattgttgtaccaataccacctgttgaaggcaactcagtacctttgttattttcaacagttgggttaactaaaaggttatctgaattagtcgtatcagtggctccatctcctaaaataaccttctgagagttatctaacaaattgtaacctaagggagcctttttctcaactagatagtatgtaccttctttcaagcctgtaatggtaattataccatctgctcctgttgtatattctgttgcattagcttctgtgccccattcaacgttatttgtatcgttaaagtttagaaattgacccgtagcattctttaaaacaaatatagcaccttgtaatgaagcttttgtggaaccatcaattttttttatagtaatttgaccatccctcactgttactttttgacctgggtcatcattgctagtattggggttgatggtcgcaatgtttgtattttctggtaaatcagctgaacctggtttagctccactctttaatactcctgtataagtgactgtgattgtatttattcccttataaaaaaagtcatcattagctccattttgagtatttccggttggagtattggtagctgcccacggaatagtaatcgtgaaattattattttcctctaacaggttatacttcccagttgctttttccgaaccttgagttagagttgtaatattccctgatccatcagtaatagttacttcataagacccttcgttcaaatcaactacagaagcagatggcatagtatcctttataacatattgatacactttttctgtaccatgataattgactgcattcttataagtaatagtatatttgactgtatcaccaaccgagtacgttttttgatctacagtttttccaccaccatctccccatgtcgcatcagtattcttttcatgaatagtagcatttggagttacagatgtaaccataatcacagctccattattaacagtgctagaaacataataatatccatattgggaaacattaataacctcagtaccatcattatttgactcagtaacagtggaaactggtgtagtattagctgatatagatttagcccatgtcgcaatctcatttgctgacgcagtatcttttttagttacatatgttctccctccattagtagttgtcgtaaaaagagaattaaaatcagttgaagctttatactcagcttctttaccttgaggaattaaataagaagctccatctttattcgaatcagatacatttgcattatctatttctgcatcaaaaactttatatgctttataggttgcgcctttttgagtatcttgaactgtaattgtccctgtctcagcggcaaaagctatcggcgtaactggtgatacagccataccaaatgctaaactcgccactaacagcgattgaatcattttctttttcattgaaatctttctcctaaaatcatattgatgaatgattaattcatattttttttcgatagtataatattaatcctgatggtagagctaaagctaaaccaactaggatataaatgtgtgttccaatacctccagtactaggcaattctgttcctttactgttagtaattttaaaagtatatactgtacttccatccactaaattctcttttattggtgtcgcattattaccattttgttcaaaggtaactcccgtagaaatcactaatactgatatatcatttttaggtagtaggtaccctggaggggcctttgtctctgttaggtagtattttcctactggcaaactgaggtagttattagcatccactaataacaagcctttatcgtttgtcaccagccctgaatacataggatgtgaagctttattcccattagcatctgattcataaatatcaaaaactgcacctgctaaaaaattattatcattttcgacattaactttctgtagtcgtactttttgcttgatacgtgtattggtaaagctaatatctacgtctcctgaaactgtcagggattgtaagccggtagcatcataagttttatcagcttcaccagttgctagatttttttctgtaattgactcagatactttaaattcatcgtaggcttgttcatctattgatatagaagttccataaggtactttaaattccttagtctgaccatctctcagcggaaaattctcttgttgcaacgtttcacttggattaaacaagaagtctttcgtcttatcttcatctagtccaacgacagttttacttactctgacggtgtattctttaggttgccaaacagcatataaggtatttgttgcatcagggttgttatcaatacctattgattgacctgctgtaaattccacacgtcctgtatcagctaaatccttatcatgatgccaaccaataaggttgtaacctgtccttgtaaagtattggttttcaggaattgtagttgtgctattcaactccatacgcggtgtctccacttgtgttaccacattaccattttctactctagtaccaccgttaccattgtatttgatggaggtatcttctaatttgatatctcctactggaataatgacaggttttatggtgatatttttattagcatctgctaaatgggcgtcaatatcaatggaatcatatgggttataaattttaccattgtaccaccagccacggaaacgatagccatctggcattgtcggacgtctcagtaaggctgaatgggagccatcgtcataggaatcagggtcagtaggctcattacttgtttgtaattgctgaccagaagcatccaatgctggctttccatctgtaccaacagcatcattgctgtatataatatgataatctccagcctttcgccaaatagctcttaaattgatatcttgagttacagcacctgaaaagttataaggtctaatactaccatctggattaacataataccaaccgactaatttgtaagcgtcttttacgtacttgtacttagttgttgtatcaacatttgagagactagtatctgtcgtataataggcatctttagttgagtcgggatctttatctcgtgaatcatacttataataatatgtacctgaaggatcttggatataatcccttgtaatatctgtataatccggaatacgatcaccataatgcaaatctaaataggtatcatctgtttttgataatcggcctccgtttggatcaatattgacacgatatgttaccttttgccaacctgcatagactttaacatcatgaggaggcatagtcgtgttaaagtcaaatacttgtgtttgtgcttggtctttataccatttaccatcccaaacataccctggtcgactaggtttaggttgaacagttgtcgtatcgggggcataagaggacaaattttgctcatatagaacatcctttactggaaaattaggaagctctgtattatcaagcggatctaaatatttaatcttgtatgaattacgttcataccataccactaagttcaaataatctttgtggtaggcaccatatctatcatagtattcatctgaaataggaacttttactcctgcactcgtttgacttgcgtactgatcaaaaaggtaattatcaggatataaacgttgataatatttaacattaaaccctagatatttttctgtaaaggtaaattcatctgccccagcacctccaccggtatctgctaaagaataagtgccatccaaaccttgtttgaagaaccgataagtttgaactatattcccttttggaaagagtttgataacatctgaatcaacggtatcattaggtaaaatgaactcacccaaataactcatcccataggttccaacttggttatttccaacattggctaaataaccccatgcacccgtcttccattgataaccattagcggccaaggttgtaccgtaaagtcctgtgtaagtatcagcatcagagctccaattatacgaatagtaatattctggcaaggaatatccgccatattttgcaaattttattgtgatgagttttctatcataataaacattaacaacacttgaaccatcgtcttttatcatgacagaagtttctgtcctcgtattattaactttaaagccagtcggtagtttatcattaatatcttgttgtgttagcgtctgattagataaagataggcctgatcgtgttacttgccctgcgtactcatatgtcttttgcgcatcagtagcatttttattatccgttgctgattgttgccagtagtttatcgtgtaggttgtttgtgcgggcgaccaatgtgcatatagcgtcgtatccttggtcaagacttgattaaaatcaaaggctgccccaccactagcagctgtgtaccaccctgcaaaagtataacctggcctcgttggatcattaggcttaattgtcgaagcaggttggcctgttaacacacgacgaggtgcaatataggtaactcctgttgataagtcgcctgtgttgaattcaacaccgtacgattctttaaagacaggataaagacttatgtctgaagatacaggtaatgcttgaatttctgattcagaaagtggagctccattttgagttttagaccaacctacaaataacaatgttgaagtgggtggtgaaactttaaatgaacttaaatccgcggttccgtttcctgaactatccaatggtacttgataacgctccaaaatacttttaccagcagaatcatcatataaagttactgtcgccactttactcataaatggacgaacacaaatttcttttgtctcagttacagttattggctcaccaaatttaacagggtcaccatactttccagtagtaggatcataggtataccaaccattaaaatgctctcctgctttaatcgtcggaatcccaacttctcctagagattctccatcttttataatttgatgatgaacttgcatacctgaagctgtcaggaaatcataatcagttccgtcattattttgaaaatggtaagttaacctaggaacttctgtattatcctcttgaacaattgcataaatggagaatgaatctgttttaaaagcaacatcactgctagtgttcttagtttctgcagtatctttagattttaatacttctgtttgaccatcatctttaaagtgaacaactttaaggttttcatctgaagcttctaatggcttatcatagttaacctctacttttactggagcttggggttctgcttctttaccatttgactcaatagtaatgtcatagagtttgaaatttttgatttcactatcttgtttagcaacctctgtcaatgcttttttcttataatctttaaaagtagctgaattgtcttttaattccgtcacctttaaatcagcatttttaggaatcttagcttctttggtcaaagtcactgttacagtatagtctgcacctctaaacatcaatggttcttcacgataagcagcttcctcagaagatgatgtttctgttacactagaagcaggagtctggggcttgctctgctcaacacttgattgagaactagatgttgatgaagttacctggctagaatttttattttctaaagtaatccccacatcatctgtcttagtttcttcaactgttattgctggtagaattaaaaaataagtcgttaaaaaagttgttaggatcatcaatgaccacatgataattttccactctttagggtgttttttcttttttaatgattcgattataaaagtttgacacttctttagcatttttgcatcctccctaaccttaattgatactactaatcttacctagaggccatattctgaaagaaattttacctacaatttgttcttctgaaacatctcctacagaagtacttcgagaatcaattgaagtttttcggttgtctcctaatacaaaaatttttttatcaggtacttgatatgggtattttatattactattaccgagtgctttatgaataacatatggttctttcaacttatgttgattcacgtaaacatccccttgagaatcaatattaacccagtctcctgactctgcaataacccgcttgactaggaccttattattgtagtaaaacgcgacaacgtctccagttttaaaatttgaaccttttactgtaaagactacatcacctgcacttaaagtcttattcattgaatgtccgtagattcttaatacaggcaaccataaaaccgcaattaaaatggctattgaggcaaccgccatcaagatgtatatggtatttttaatgacactccaaaagcgtttctgataagttacgcgatccagttcttgagataatttatctgaactaatctgtcttttcattgtctacgcctctcttatctactaaattctttacgttttctaaataggtatctgcagctaactgagcagtctcaaaaataccactaagcattaaggaagcttcggcaatagaaccagctttgctaattttgatttttttatcatctagcgcttctttaagttgctgaatctctttctcttgtttttcaataagaagttgctgttctaacataatttctagcaagtcttttctttttaatttttttaaatcttccatcgcgattacttccttaactgaaccttaaattatcgtttagatattatatcaaagttctaacctttaaactcattttttgtcctgtgttttttctcaaaaaagtctatgctaaattaacatttttgataattttttgaaaaatctcatcgaagtcattttctttttgaaagctcgaattctaggcattaaaaagccatatatcaaattgatatatggctttttttattatttaaaacaaaagaatcaataggacaatagcgtcaatttagtgacataatctattacagattaagttctttttgaataatataatccaacttttcaactgttttttcccatgtgaaatgttctttaattcttttagcaatattctgttgtagtttctctcttaatgccttatcttttactaataaatcaagagattcatggagtgactgagtattttcttccatgatgattcctaactcagggctatcaataacttcaactgttccaccgcgatctgttgcaataatagcactcgaaagtagaccagcttctaaaatagaggttggtaatccctctggatacattgatgggtaaacaaagatatctgtctgtgccattaaagacatagtctgttcaaagtttaatttccccaaaaagttaatctgtttggactgatatttctctttcaaatgtgctaattcaggtccgtctcctgcaatctgtaaataaacattttcagagtactgtgacatcgaaaatgcttctaagagcaattcaatgcctttttctttaataattctaccagcataagtgatgaaaatatcatcagcagatttttcaaggtaagccgtgtcagcaaaatcagaacctagactttcagataccgaattataaataactcctttagcttctatattaaaatgttttaaccactcaacgcttctcttagataccgcataaaaatctggacgatagtgcttaacacgcgctgtgagaagatgttcatagatagctccaaagaaatctaaaaaacgattattgacagaaaaatgacttgacccatggtctaaaacaatactaggtaaacggtgcttctttgcaaaagatagcccttctagcgttgttaactgaaaacgtgtattacaaatcacaaaatcaatattttcatctgaaacatgtttcatcagcgtgttgtattctcgatttttgttaataataggatagcgctgcttgacaatatttttggtcggtaaacggtaaatttttctacccttgtcttcatctataatcggtaaatcatcatgattagttgttacaataacaacacggtagccacgcttaaccaaatctgctgtcattttatctgtataacgttcaatacctccgaggaagggtagataatatcctgagaaaacagcaactgtttttaccttattttccatatttatccactttcatcaataagccatcttttaagcctttaatcatagcaactaattttttgctcttttgctcttctgctaccaacactcgaacaaattcatttcgcataaatactaaatatttgtgccgcttcttcttaccatatttttttataatataaatcgcattgcgtatcatgtaatattttcgaaatggtgaatgattcaatacatgaaaaacatggccaaattttttaactcgtgaagagtgtccaatttcgtgtaaaagaccaataaaattaacctgataagtcttatatcccatctctgacagacgataattcatttcagagtcaacaaaatcaataaacatctcttctgcaaagccagatgtttcttcaaaaacgctcgttttcattaaagcagccgaagtaatacactcttcaatttctttatagtcaaattcttgcataactaaatcttcacggttcatatcttgatacaaacaagataacataccgaccttaggtaaaagaaggtaattttcataattatctatcaaatcacctaggacaaccgaatcttgatctaaagtcaagaaccaatcaaattcttgtgctactgcaaattgaccgatacagttcaaagcatatgcaattcctttattttctgttaaataatcaacagttaggtgcccctcttcattataatcggccactaattgagaaatttcttccttatttttcgagccattatctacgatgtagatatggcttacttgaggataaattgctcgaatgttctgatctaagcgttcaatattggggttaaaggtgacaatacccgctaaatatttcatgttctatgctcttttctaaaatctctaaataactgaatgactggtgctttggttataaaaacgataccgacatagatagttactgctactaaactttgaatgacataatttaccaatgatactgacatttgagtattgatataataaagtacagctccactaagagtagcagcaattaaatagcgcagcattcctcttgttaattctttaaaagtaaatacatctcttaaagagatagcttgatagagggagacaataaattcagtaataactgtagagataatagctcccatagcacctaaaattggtattaaaagtatattaagcacaacatttgccacaagtccaataactgcagacattgtgtaagcttttgtacgtcttgaagccagtagatactgtgtccctaaagcgttaccataagaaatgcaaatgatcatcaaa

SEQ ID NO: 491 - DNA, 13954 bp, Streptococcus agalactiae
tccacatcggtccaattaacatatgacgtggcgcatcaccagtaattcggtgaataacaatatgttttggaataatctccagttggtcacaaataatcgaaatatagtcttcttgacttaacaaacgtaaacgaccttcatggtaatctctctgcattcttgtattatgcataagatgcagaaggtgtaattttataccctgaatatcattatccgtaacacatcgacgaacattttccaccatcatatcatgtgtctcccctgggagaccatttattaggtgagaaacgatttctactttaggagctaattctcgtattctcttaacagtttttttgtaaaggtcatatgaatgtgctctatttattaatgcagaagttgcttcataagttgtctgaaggcctaattctaaagtcacatgcattctttcagaaagttcagcgagatagtatatagtttcatcaggtaagcaatccggccttgttccgatgttgatcccgataactcctggctcattaatagcctgttcgtaacgctctttaattatctctaacttagcatgggtattggtaaaattttgaaaatagactaagtatttattaacctcaggccactttctatgcatgaaatcaatttctttatagaattgttcacgaataggagcttctggagcaactatagcatcccctgaaccagaaactgtgcaaaaagtgcaccctcctctagcaactgttccatctctgttaggacagtcaaaaccagcatctataggtaatttaaatattttttctccaaagagttctcgataataatcattaatcgcacgataacgttttttcataggataattgtatcacaattttaactaaaataacctcactactacaataaaactaaaaaagattggaacgtcagttagttccaatcttttatttacttcactttctttaaccaatccttggctaaaaagatatacgcagttagattcaaaataccataagcaagtataaaaccagctaaaacatctgtcggaaaatgaacccctaggtaaatacgagataacccaattaaaaaaatgagcaaacccaaaataccttggcacaacagtttccatatactcttaggcatatagtactgcaataaaataataatactcccaaatatcataaatgttcccatcgagtgcccactgggaaacgaatagccacctgcaaatactaaatgggttaaagttggtctcactctttgaaaaataagttttaaagaaagtatacatataccagagataatagcatttactgcgataaatctagcttgaggataccacttcttaaggtaacagaaagtgacgctcataatcgcaatagctatctggcttacagtattaccaaccacagtgattaacttgaaaaatcttgtagaaagatttggcaactgtcctctaacactttcttgaatagtttggtcaaatgcgattacagtgtcgggccaatatttgatgaccaatcctaaactgaaaaataagataatagcaataaatgcttgaataagtttactattttgacgagataacattagtctttttatatctttctaatattggcaaacaagccacgtaagttagatagaaaacaatcgaaattaaaattccctcaacgatattaaatggaataaccattgttaaaaggtaattgcctacaccaataaatgttctgatatcaaagttagcaaatatagcatacaaaggaatcgcaaagacatagttgagagctaccatagatacagtcaagctaactgtaccaaataaactagctttaataaaatcttttgcactctctctatttttccagaaaatagcgaaacttgctaaaaatagagctagagcaaccatattcatcggtaaaccgataaaggtttctggaccacgattagcaagtataacttttaaaagtgatcttaataagagtacaccataacttgatttcaaatcaaataaaataaaagcaactaacatcggaaggattgaaaaatcaacctttaaaaattctgctcctggtattaatggaaatgaaaccatcatcaatacaaaagataaggcagaaagaatggcgattgtcaccattttacgtgtatttgtcataaaaaaattcctccaatttaaataaattgaaagaagctccaaaggtaagcgtaggtacgcgaaaaaaacctttgtcttctcccatccagactttactgtcggttgtggaatctcaccacatcagctttcgctcgcggactgatgcttcacaactgacaaataagttggaagcgattaccgccggtcgggaattacaccctgccctgaagacacctatagcataacaaaaaaaacttgcaattgcaagttttttaatcactaattagtagtagattgtataatattaatttttaacatcaattaattgacagcgcactaatactctagctactcctgcctttgtacaagtaaacaagcttaagtcccaatcattgtctgatgtggcagttttataaactttttcaatcgctgttggttcaataatttctctattactgattttgtagtgatagatttgccctgttgtagttgtaaaataaacatccgttcccatatctacattttttaaagcatcaaaatgataaggaaaattatgcgcacaaatcaccatgttattagttaaataagaaccataataccttgtaggcgttttagacagttgttcaaaactataattagcagctaccggtaaatgcagttttaagttcggaatatccagagttcccaagtaatctgttttatccaacttttttacaggtaattctccattttctgaaccctttacttgatgcgtaatagatttatcaagcgccttgacaatatactgagaagttaaatcagcttgatgcgcctgattaatattataccaaccccaatagattccagaacttaccagaatgattccaagtatcgctaaaaaatttgctgaatatcttctaatcacgtcttcttctccattttaaggctattattaaacacagaagtcctgacataattagtataggtattggccaccatacttgtccagtaaacgggagctttccctttgtctgatgtgctactgtaggagtaatcgtctcttcttttttaggtttagcatttaaagggctcattttctcaaatgctgtaatatcgtacttcccatccttaggtattgatagtataaagggagacattagttcataaccttgagctgttttagtctgaataaatagataaatcccttgaggaagattgttcgcaacaataccttcagccggtaaattatcaaacgtttgtaaaggttgaattttatgaacagcttttgttagtagattgacatatttggcttggttactatcaaggtttacttgtgttaaatcatcgtcttttattccaataccttgaaatggggtagttagagtaaaaacttggttaccatcaacatctttagcttgtgctacttggtaaacaagtaaattaccgccagcgataccttgattattatacttattttgtatagtaatagaacccgttttcatctgatcattggtatcagcagacacaagttgagtacttagactaaataataagagaagagttatatttaggatctttttataaatcattgttctcttcctttctcattgcttgttttaaaattttcttacgttgacgtgctctcctagttacttctaaaaagattaaaagtaaaatcaaagtaaggaaaatagcgataaatggtgcgatataaataggctctatttgtattgcctctgctaccaccaaagcgttaccattatcgtttggtacacgatgtcctctcactagtaaccgatgggtattaacaccatatggtgtacacgtcaccaaagtttggtagtctttacctttaacaatttgtaaatccctcaaatcatccggtttaactgttctgatttgatccacttgataagtatatgtttcatttaagatactgactgtccagtggtctccagcttttaacttatccaaatcagaaaaaagccttgaagagggtaaacctctatgtcctgataaaatagaatgagttgagtctcctccaattggaagactacttccttctaaatgaccaatagaagtttgaagcaccttttcacttgtaccatgataaagtggtaattttatatttatctttggaattgaaatataacccatattacccgttttatcgatagccagttgtgaattataatccaaacgctcttggtcagtcatgtgccacttcattcctgaagttttaaattgcttattatattctttggctcggttaataatttttttatagtcgttttcatccatatgcgttacgcggtcttggtaatccataatcgctcgagattggtgaaatgaattccaataattagcaagtgaaggataagccattaagcctacccccactgcaattatagtgacaagcaaaatggatactaaatgttgtcttatttttttcatatattttaaatctgtaccactttgctagcccatcttattaagaacgtaaacgacgacgagcaacaagcacgatacctgctcctattactaaaattgcacctataatgtagaaaattgttgtaccaataccacctgttgaaggcaactcagtacctttgttattttcaacagttgggttaactaaaaggttatctgaattagtcgtatcagtggctccatctcctaaaataaccttctgagagttatctaacaaattgtaacctaagggagcctttttctcaactagatagtatgtaccttctttcaagcctgtaatggtaattataccatctgctcctgttgtatattctgttgcattagcttctgtgccccattcaacgttatttgtatcgttaaagtttagaaattgacccgtagcattctttaaaacaaatatagcaccttgtaatgaagcttttgtggaaccatcaattttttttatagtaatttgaccatccctcactgttactttttgacctgggtcatcattgctagtattggggttgatggtcgcaatgtttgtattttctggtaaatcagctgaacctggtttagctccactctttaatactcctgtataagtgactgtgattgtatttattcccttataaaaaaagtcatcattagctccattttgagtatttccggttggagtattggtagctgcccacggaatagtaatcgtgaaattattattttcctctaacaggttatacttcccagttgctttttccgaaccttgagttagagttgtaatattccctgatccatcagtaatagttacttcataagatccttcgttcaaatcaactacagaagcagatggcatagtatcctttataacatattgatacactttttctgtaccatgataattgactgcattcttataagtaatagtatatttgactgtatcaccaaccgagtacgttttttgatctacagtttttccaccaccatctccccatgtcgcatcagtattcttttcatgaatagtagcatttggagttacagatgtaaccataattacagctccattattaacagtgctagaaacataataatatccatattgggaaacattaataacctcagtaccatcattatttgactcagtaacagtggaaactggtgtagtattagctgatatagatttagcccatgtcgcaatctcatttgctgacgcagtatcttttttagttacatatgttctccctccattagtagttgtcgtaaaaagagaattaaaatcagttgaagctttatactcagcttctttaccttgaggaattaaataagaagctccatctttattcgaatcagatacatttgcattatctatttctgcatcaaaaactttgtatgctttataggttgcgcctttttgagtatcttgaactgtaattgtccctgtctcagcggcaaaagctatcggcgtaactggtgatacagccataccaaatgctaaactcgccactaacagcgattgaatcattttctttttcattgaaatctttctcctaaaatcatattgatgaatgattaattcatattttttttcgatagtataatattaatcctgatggtagagctaaagctaaaccaactaggatataaatgtgtgttccaatacctccagtactaggcaattctgttcctttactgttagtaattttaaaagtatatactgtacttccatctactaaattctcttttattggtgtcgcattattaccattttgttcaaaggtaactcccgtagaaatcactaatactgacatatcatttttaggtagtaggtaccctggaggggcctttgtctctgttaggtagtattttcctactggcaaactgaggtagttattagcatccactaataacaagcctttatcgtttgtcaccagccctgaatacataggatgtgaagctttattcccattagcatctgattcataaatatcaaaaactgcacctgctaaaaaattattatcattttcgacattaactttctgtagtcgtactttttgcttgatacgtgtattggtaaagctaatatctacgtctcctgaaactgtaagggattgtaagccggtagcatcataagttttatcagcttcaccagttgctagatttttttctgtaattgactcagatactttaaattcatcgtaggcttgttcatctattgatatagaagttccataaggtactttaaattccttagtctgaccatctctcagcggaaaattctcttgttgcaacgtttcacttggattaaacaagaagtctttcgtcttatcttcatctagtccaacgacagttttacttactctgacggtgtattctttaggttgccaaacagcatataaggtatttgttgcatcagggttgttatcaatacctattgattgacctgctgtaaattccacacgtcctgtatcagctaaatccttatcatgatgccaaccaataaggttgtaacctgtccttgtaaagtattggttttcaggaattgtagttgtgctattcaactccatacgcggtgtctctacttgtgttaccacattaccattttctactctagtaccaccgttaccattatatttgattgaggtatcttctaatttgatatctcctactggaataatgacaggttttatggtgatatttttattagcatctgctaaatgggcgtcaatatcaatggaatcatatgggttataaattttaccattgtaccaccagccacggaaacgatagccatctggcattgtcggacgtctcagtaaggctgaatgggagccatcgtcataggaatcagggtcagtaggctcattacttgtttgtaattgctgaccagaagcatccaatgctggctttccatctgtaccaacagcatcattgctgtatataatatgataatctccagcctttcgccaaatagctcttaaattgatatcttgagttacagcacctgaaaagttataaggtctaatactaccatctggattaacataataccaaccgactaatttgtaagcgtcttttacgtacttgtacttagttgttgtatcaacatttgagagactagtatctgtcgtataataggcatctttagttgagtcgggatctttatctcgtgaatcatacttataataatatgtacctgaaggatcttggatataatcccttgtaatatctgtataatccggaatacgatcaccataatgcaagtctaaataggtatcatctgtttttgataattggcctccgtttggatcaatattgacacgatatgttaccttttgccaacctgcatagactttaacatcatgaggaggcatagtcgtgttaaagtcaaatacttgtgtttgtgcttggtctttataccatttaccatcccaaacataccctggtcgactaggtttaggttgaaccgttgtcgtatcgggggcataagaggacaaattttgctcatatagaacatcctttactggaaaattaggaagctctgtattatcaagcggatctaaatatttaatcttgtatgaattacgttcataccataccactaagtccaaataatctttgtgataatatccatactgatcgtaatattcatcagcgactggcacagttgtattagcactagtttgtagtggcttagcatcaaataagtaattatctggatacaagctttgatagtatttaacattaaatcctaagtatttttctgtaaaggtaaactcgtctgctccagcacctccccctacgtctgataaaaagtatttgccatctagtccttgtttatagaaagcataattttgaaattcgctgaccaacaggatacaattttatttcataaggatttgctccacgtactccactgggaagtataaactcacccaaataactcattcctgatactccagttgaagttaggtaacgccacgcacctgtcttccactgatagccattcgcagctaaagtcgtaccatatagtccagtataggtgtcggcatatgatgcactagtccaaggaaacgaagaactttgataataaacctcagagtagcccgtcttcgcaaatctcatagtcacaagttttctatcataataaacattaacgacacttgaaccatcgtcttttatcatgacagaagtttctgtcctcgtattattaactttaaagccagtcggcaattttgcattaatatcttgttgtgttagcgtctgattagataaagataggcctgatcgtgttacttgccctgcgtactcatatgtcttttgcgcatcagtagcatttttattatccgttgctgattgttgccagtagtttatcgtgtaggttgtttgtgcgggcgaccaatgtgcatatagcgtcgtatccttggtcaagacttgattaaaatcaaaggctgtcccaccactagcagctgtgtaccaccctgcaaaagtataacctggccttgttggatcattaggcttaattgtcgaagcaggttggtctgttaacacacgacgaggtgcaatataggtaactcctgttgataagtcgcctgtgttgaattcaacaccgtacgattctttaaagacaggataaagacttatgtctgaagatacaggtaatgcttgaatttctgattcagaaagtggagctccattttgagttttagaccaacctacaaataataatgttgaagtgggtggtgaaactttaaatgaacttagatccgcggttccgtttcctgaactatccaatggtacttgataacgctccaaaatacttttaccagcagaatcatcatataaagttactgtcgccactttactcataaatggacgaacataaatttcttttgtctcagttacagttattggctcaccaaatttaacagggtcaccatactttccagtagtaggatcataggtataccaaccattaaaatgctctcctgctttaatcgtcggaatcccaacttctcctagagattctccatcttttataatttgatgatgaacttgcatacctgaagctgtcaggaaattataatcagttccgtcattattttgaaaatggtaagttaacctaggaacttctgtattatcctcttgaacaattgcataaatggagaatgaatctgttttaaaagcaacatcactgctagtgttcttagtttctgcagtatctttagattttaatacttctgtttgaccatcatctttaaagtgaacaactttaaggttttcatctgaagcttctaatggcttatcatagttgacctctacttttactggggcttggggttctgcttctttaccatttgactcaatagtaatgtcatagagtttgaagtttttgatttcactatcttgtttagcaacttctgtcaatgcttttttcttatagtctttaaaagtagctgaattgtcttttaattccgtcacctttaaatcagcatttttaggaatcttagcttctttggtcaaagtcactgttacagtatagtctgcacctctaaacatcaatggttcttcacggtaagcagcttcctcagaagatgatgtttctgttacactagaagcaggagtctgtggcttgctctgctcaacacttgattgagaactagatgttgatgaagttacctggctagaatttttattttctaaagtaatccccacatcatctgtcttagtttcttcaactgttattgctggtagaattaaaaaataagtcgttaaaaaagttgttaggatcatcaatgaccacatgataattttccactctttagggtgttttttcttttttaatgattcgattataaaagtttgacacttctttagcatttttcatcctccctaaccttaattgatactactaatcttacctagaggccatattctgaaagaaattttacctacaatttgttcttctgaaacatctcctacagaagtatttcgagaatcaattgaagtttttcggttgtctcctaatacaaaaatttttttatcaggtacttgatatgggtattttatattactattaccgagtgctttatgaataacatatggttctttcaacttatgttgattcacgtaaacatccccttgagaatcaatattaacccagtctcctgactctgcaataacccgcttgactaggaccttattattgtagtaaaacgcaacaacgtctccagttttaaaatttgaaccttttactgtaaagactacatcacctgcacttaaagtcttattcattgaatgtccgtagattcttaatacaggcaaccataaaaccgcaattaaaatggctgttgaggcaaccgccatcaagatgtatatggtatttttaatgacactccaaaagcgtttctgataagttacgcgatccagttcttgagataatttatctgaactaatctgtcttttcattgtctacgcctctcttatctactaaattctttacgttttctaaataggtatctgcagctaactgagcagtctcaaaaataccactaagcattaaggaagcttcggcaatagaaccagctttgctaattttgatttttttatcatctagcgcttctttaagttgctgaatctctttctcttgtttttcaataagaagttgctgttctaacataatttctagcaagtcttttctttttaatttttttaaatcttccatcgcgattacttccttaactgaaccttaaattatcgtttagatattatatcaaagttctaacctttaaactcattttttgtcctgtgttttttctcaaaaaagtctatgctaaattaacatttttgataattttttgaaaaatctcatcgaagtcattttctttttgaaagctcgaattctaggcattaaaaacaaaagaatcaataggacaatagcatcaatttagtgacacaatctattacagattaagttctttttgaataatataatccaacttttcaactgttttttcccaggtgaaatgttctttaattcttttagcaatattctgttgtaatttctctcttaatgccttatcttttactaataaatcaagagattcatggagtgactgagtattttcttccatgatgattcctaactcagggctatcaataacttcaactgttccaccgcgatctgttgcaataatagcactcgaaagtagaccagcttctaaaatagaggttggtaatccctctggatacattgatgggtaaacaaagatatctgtctgtgccattaaagacatagtctgttcaaagtttaatttccccaaaaagttaatctgtttggactgatatttctctttcaaatgtgctaattcaggtccgtctcctgcaatctgtaaataaacattttcagagtactgtgacatcgaaaatgcttctaagagcaattcaatgcctttttctttaataattctaccagcataagtgatgaaaatatcatcagcagatttttcaaggtaagccgtaccagcaaaatcagagcctagactttcagataccgaattataaataactcctttagcttctatattaaaatgttttaaccattcaacgcttctcttggataccgcataaaaatctggacgatagtgcttaacacgcgctgtgagaagatgttcatagatagctccaaagaaatctaaaaaacgattattgacagaaaaatgacttgacccatggtctaaaacaatactaggtaaacggtgcttctttgcaaaagatagcccttctagcgttgttaactgaaaacgtgtattacaaatcacaaaatcaatattttcatctgaaacatgtttcatcagcgtgttgtattctcgatttttgttaataataggatagcgctgcttgacaatgtttttggtcggtaaacggtaaatttttctacccttgtcttcatctataatcggtaaatcaccatgattagttgttacaataacaacacggtagccacgcttaaccaaatctgctgtcattttatctgtataacgttcaatacctccgaggaagggtagataatatcctgagaaaacagcaactgtttttaccttattttccatatttatccactttcatcaataagccatcttttaagcctttaatcatagcaactaattttttgctcttttgctcttctgctaccaacactcgaacaaattcatttcgcataaatactaaatatttgtgccgcttcttcttaccatatttttttataatataaatcgcattgcgtatcatgtaatattttcgaaatggtgaatgattcaatacatgaaaaacatggccaaattttttaactcgtgaagagtgtccaatttcgtgtaaaagaccaataaaattaacctgataagtcttatatcccatctctgacagacgataattcatttcagagtcaacaaaatcaataaacatctcttctgcaaagccagatgtttcttcaaaaacgctcgttttcattaaagcagccgaagtaatacactcttcaatttctttatagtcaaattcttgcatcactaaatcttcacggttcatatcttgatacaaacaagataacataccgaccttaggtaaatgaaggtaattttcataattatctatcaaatcacctaggacaaccgaatcttgatctaaagtcaagaaccaatcaaattcttgtgctactgcaaattgaccaatacagttcaaagcatatgcaattcctttattttctgttaaataatcaacagttaggtgcccctcttcattataatcggccactaattgagaaatttcctccttatttttcgagccattatctacgatgtagatatggcttacttgaggataaattgctcgaatgttctgatctaagcgttcaatattggggttaaaggtgacaatacccgctaaatatttcatgttctatgctcttttctaaaatctctaaataactgaatgactggtgctttggttataaaaacgataccgacatagatagttactgctactaaactttgaatgacataatttaccaatgatactgacatttgagtattgatataatagagtacagctccactaagagtagcagcaattaaatagcgcagcattcctcttgttaattctttaaaagtaaatacatctcttaaagagatagcttgatatagagagacaataaattcagtaataactgtagagataatagctcccatagcacctaaaattggtattaaaagtatattaagcacaacatttgccacaagtccaataactgcagacattgtgtaagcttttgtacgtcttgaagccagtagatactgtgtccctaaagcgttaccataagaaatgcaaatgatcatcaaa

SEQ ID NO: 492 - protein, 3 aa, Streptococcus agalactiae
  VARIANT (1)...(3): Xaa = Any Amino Acid
XXX

SEQ ID NO: 493 - protein, 554 aa, Streptococcus agalactiae; identical to SEQ ID NO: 2

SEQ ID NO: 494 - protein, 554 aa, Streptococcus agalactiae
MKLSKKLLFSAAVLTIVAGSTVEPVAQFATGMSIVRAAEVSQERPAKTTVNIYKLQADSYKSEITSNGGIENKDGEVISNYAKLGDNVKGLQGVQFKRYKVKTDISVDELKKLTTVEAADAKVGTILEEGVSLPQKTNAQGLVVDALDSKSNVRYLYVEDLKNSPSNITKAYAVPFVLELPVANSTGTGFLSEINIYPKNVVTDEPKTDKDVKKLGQDDAGYTIGEEFKWFLKSTIPANLGDYEKFEITDKFADGLTYKSVGKIKIGSKTLNRDEHYTIDEPTVDNQNTLKITFKPEKFKEIAELLKGMTLVKNQDALDKATANTDDAAFLEIPVASTINEKAVLGKAIENTFELQYDHTPDKADNPKPSNPPRKPEVHTGGKRFVKKDSTETQTLGGAEFDLLASDGTAVKWTDALIKANTNKNYIAGEAVTGQPIKLKSHTDGTFEIKGLAYAVDANAEGTAVTYKLKETKAPEGYVIPDKEIEFTVSQTSYNTKPTDITVDSADATPDTIKNNKRPSIPNTGGIGTAIFVAIGAAVMAFAVKGMKRRTKDN

SEQ ID NO: 495 - protein, 554 aa, Streptococcus agalactiae; identical to SEQ ID NO: 494

SEQ ID NO: 496 - protein, 554 aa, Streptococcus agalactiae; identical to SEQ ID NO: 2

SEQ ID NO: 497 - protein, 554 aa, Streptococcus agalactiae; identical to SEQ ID NO: 2

SEQ ID NO: 498 - protein, 890 aa, Streptococcus agalactiae; identical to SEQ ID NO: 11

SEQ ID NO: 499 - protein, 890 aa, Streptococcus agalactiae; identical to SEQ ID NO: 11

SEQ ID NO: 500 - protein, 890 aa, Streptococcus agalactiae
MKKRQKIWRGLSVTLLILSQIPFGILVQGETQDTNQALGKVIVKKTGDNATPLGKATFVLKNDNDKSETSHETVEGSGEATFENIKPGDYTLREETAPIGYKKTDKTWKVKVADNGATIIEGMDADKAEKRKEVLNAQYPKSAIYEDTKENYPLVNVEGSKVGEQYKALNPINGKDGRREIAEGWLSKKNTGVNDLDKNKYKIELTVEGKTTVETKELNQPLDVVVLLDNSNSMNNERANNSQRALKAGEAVEKLIDKITSNKDNRVALVTYASTIFDGTEATVSKGVADQNGKALNDSVSWDYHKTTFTATTHNYSYLNLTNDANEVNILKSRIPKEAEHINGDRTLYQFGATFTQKALMKANEILETQSSNARKKLIFHVTDGVPTMSYAINFNPYISTSYQNQFNSFLNKIPDRSGILQEDFIINGDDYQIVKGDGESFKLFSDRKVPVTGGTTQAAYRVPQNQLSVMSNEGYAINSGYIYLYWRDYNWVYPFDPKTKKVSATKQIKTHGEPTTLYFNGNIRPKGYDIFTVGIGVNGDPGATPLEAEKFMQSISSKTENYTNVDDTNKIYDELNKYFKTIVEEKHSIVDGNVTDPMGEMIEFQLKNGQSFTHDDYVLVGNDGSQLKNGVALGGPNSDGGILKDVTVTYDKTSQTIKINHLNLGSGQKVVLTYDVRLKDNYISNKFYNTNNRTTLSPKSEKEPNTIRDFPIPKIRDVREFPVLTISNQKKMGEVEFIKVNKDKHSESLLGAKFQLQIEKDFSGYKQFVPEGSDVTTKNDGKIYFKALQDGNYKLYEISSPDGYIEVKTKPVVTFTIQNGEVTNLKADPNANKNQIGYLEGNGKHLITNTPKRPPGVFPKTGGIGTIVYILVGSTFMILTICSFRRKQL

SEQ ID NO: 501 - protein, 890 aa, Streptococcus agalactiae; identical to SEQ ID NO: 11

SEQ ID NO: 502 - protein, 890 aa, Streptococcus agalactiae; identical to SEQ ID NO: 11

SEQ ID NO: 503 - protein, 890 aa, Streptococcus agalactiae; identical to SEQ ID NO: 11

SEQ ID NO: 504 - protein, 890 aa, Streptococcus agalactiae; identical to SEQ ID NO: 11

SEQ ID NO: 505 - protein, 901 aa, Streptococcus agalactiae
MRKYQKFSKILTLSLFCLSQIPLNTNVLGESTVPENGAKGKLVVKKTDDQNKPLSKATFVLKTTAHPESKIEKVTAELTGEATFDNLIPGDYTLSEETAPEGYKKTNQTWQVKVESNGKTTIQNSGDKNSTIGQNQEELDKQYPPTGIYEDTKESYKLEHVKGSVPNGKSEAKAVNPYSSEGEHIREIPEGTLSKRISEVGDLAHNKYKIELTVSGKTIVKPVDKQKPLDVVFVLDNSNSMNNDGPNFQRHNKAKKAAEALGTAVKDILGANSDNRVALVTYGSDIFDGRSVDVVKGFKEDDKYYGLQTKFTIQTENYSHKQLTNNAEEIIKRIPTEAPKAKWGSTTNGLTPEQQKEYYLSKVGETFTMKAFMEADDILSQVNRNSQKIIVHVTDGVPTRSYAINNFKLGASYESQFEQMKKNGYLNKSNFLLTDKPEDIKGNGESYFLFPLDSYQTQIISGNLQKLHYLDLNLNYPKGTIYRNGPVKEHGTPTKLYINSLKQKNYDIFNFGIDISGFRQVYNEDYKKNQDGTFQKLKEEAFELSDGEITELMRSFSSKPEYYTPIVTSADTSNNEILSKIQQQFETILTKENSIVNGTIEDPMGDKINLQLGNGQTLQPSDYTLQGNDGSVMKDGIATGGPNNDGGILKGVKLEYIGNKLYVRGLNLGEGQKVTLTYDVKLDDSFISNKFYDTNGRTTLNPKSEDPNTLRDFPIPKIRDVREYPTITIKNEKKLGEIEFIKVDKDNNKLLLKGATFELQEFNEDYKLYLPIKNNNSKVVTGENGKISYKDLKDGKYQLIEAVSPEDYQKITNKPILTFEVVKGSIQNIIAVNKQISEYHEEGDKHLITNTHIPPKGIIPMTGGKGILSFILIGGAMMSIAGGIYIWKRYKKSSDMSIEKD

SEQ ID NO: 506 - protein, 901 aa, Streptococcus agalactiae; identical to SEQ ID NO: 16

SEQ ID NO: 507 - protein, 901 aa, Streptococcus agalactiae
MRKYQKFSKILTLSLFCLSQIPLNTNVLGESTVPENGAKGKLVVKKTDDQNKPLSKATFVLKTTAHPESKIEKVTAELTGEATFDNLIPGDYTLSEETAPEGYKKTNQTWQVKVESNGKTTIQNSGDKNSTIGQNQEELDKQYPPTGIYEDTKESYKLEHVKGSVPNGKSEAKAVNPYSSEGEHIREIPEGTLSKRISEVGDLAHNKYKIELTVSGKTIVKPVDKQKPLDVVFVLDNSNSMNNDGPNFQRHNKAKKAAEALGTAVKDILGANSDNRVALVTYGSDIFDGRSVDVVKGFKEDDKYYGLQTKFTIQTENYSHKQLTNNAEEIIKRIPTEAPKAKWGSTTNGLTPEQQKEYYLSKVGETFTMKAFMEADDILSQVNRNSQKIIVHVTDGVPTRSYAINNFKLGASYESQFEQMKKNGYLNKSNFLLTDKPDDIKGNGESYFLFPLDSYQTQIISGNLQKLHYLDLNLNYPKGTIYRNGPVKEHGTPTKLYINSLKQKNYDIFNFGIDISGFRQVYNEEYKKNQDGTFQKLKEEAFKLSDGEITELMRSFSSKPEYYTPIVTSADTSNNEILSKIQQQFETILTKENSIVNGTIEDPMGDKINLQLGNGQILQPSDYTLQGNDGSVMKDGIATGGPNNDGGILKGVKLEYIGNKLYVRGLNLGEGQKVTLTYDVKLDDSFISNKFYDTNGRTTLNPKSEDPNTLRDFPIPKIRDVREYPTITIKNEKKLGEIEFIKVDKDNNKLLLKGATFELQEFNEDYKLYLPIKNNNSKVVTGENGKISYKDLKDGKYQLIEAVSPEDYQKITNKPILTFEVVKGSIKNIIAVNKQISEYHEEGDKHLITNTHIPPKGIIPKTGGKGILSFILIGGAMMSIAGGIYIWKRYKKSSDMSIKKD

SEQ ID NO: 508 - protein, 901 aa, Streptococcus agalactiae
MRKYQKFSKILTLSLFCLSQIPLNTNVLGESTVPENGAKGKLVVKKTDDQNKPLSKATFVLKTTAHPESKIEKVTAELTGEATFDNLIPGDYTLSEETAPEGYKKTNQTWQVKVESNGKTTIQNSGDKNSTIGQNQEELDKQYPPTGIYEDTKESYKLEHVKGSVPNGKSEAKAVNPYSSEGEHIREIPEGTLSKRISEVGDLAHNKYKIELTVSGKTIVKPVDKQKPLDVVFVLDNSNSMNNDGPNFQRHNKAKKAAEALGTAVKDILGANSDNRVALVTYGSDIFDGRSVDVVKGFKEDDKYYGLQTKFTIQTENYSHKQLTNNAEEIIKRIPTEAPKAKWGSTTYGLTPEQQKEYYLSKVGETFTMKAFMEADDILSQVNRNSQKIIVHVTDGVPTRSYAINNFKLGASYESQFEQMKKNGYLNKSNFLLTDKPEDIKGNGESYFLFPLDSYQTQIISGNLQKLHYLDLNLNYPKGTIYRNGPVKEHGTPTKLYINSLKQKNYDIFNFGIDISGFRQVYNEEYKKNQDGTFQKLKEEAFKLSDGEITELMRSFSSKPEYYTPIVTSADTSNNEILSKIQQQFETILTKENSIVNGTIEDPMGDKINLQLGNGQTLQPSDYTLQGNDGSVMKDGIATGGPNNDGGILKGVKLEYIGNKLYVRGLNLGEGQKVTLTYDVKLDDSFISNKFYDTNGRTTLNPKSEDPNTLRDFPIPKIRDVREYPTITIKNEKKLGEIEFIKVDKDNNKLLLKGATFELQEFNEDYKLYLPIKNNNSKVVTGENGKISYKDLKDGKYQLIEAVSPEDYQKITNKPILTFEVVKGSIKNIIAVNKQISEYHEEGDKHLITNTHIPPKGIIPMTGGKGILSFILIGGAMMSIAGGIYIWKRYKKSSDMSIKKD

SEQ ID NO: 509 - protein, 901 aa, Streptococcus agalactiae
MRKYQKFSKILTLSLFCLSQIPLNTNVLGESTVPENGAKGKLVVKKTDDQNKPLSKATFVLKTTAHPESKIEKVTAELTGEATFDNLIPGDYTLSEETAPEGYKKTNQTWQVKVESNGKTTIQNSGDKNSTIGQNQEELDKQYPPTGIYEDTKESYKLEHVKGSVPNGKSEAKAVNPYSSEGEHIREIPEGTLSKRISEVGDLAHNKYKIELTVSGKTIVKPVDKQKPLDVVFVLDNSNSMNNDGPNFQRHNKAKKAAEALGTAVKDILGANSDNRVALVTYGSDIFDGRSVDVVKGFKEDDKYYGLQTKFTIQTENYSHKQLTNNAEEIIKRIPTEAPKAKWGSTTNGLTPEQQKEYYLSKVGETFTMKAFMEADDILSQVNRNSQKIIVHVTDGVPTRSYAINNFKLGASYESQFEQMKKNGYLNKSNFLLTDKPEDIKGNGESYFLFPLDSYQTQIISGNLQKLHYLDLNLNYPKGTFYRNGPVREHGTPTKLYINSLKQKNYDIFNFGIDISGFRQVYNEDYKKNQDGTFQKLKEEAFELSDGEITELMKSFSSKPEYYTPIVTSSDASNNEILSKIQQQFEKILTKENSIVNGTIEDPMGDKINLQLGNGQTLQPSDYTLQGNDGSIMKDSIATGGPNNDGGILKGVKLEYIKNKLYVRGLNLGEGQKVTLTYDVKLDDSFISNKFYDTNGRTTLNPKSEDPNTLRDFPIPKIRDVREYPTITIKNEKKLGEIEFTKVDKDNNKLLLKGATFELQEFNEDYKLYLPIKNNNSKVVTGENGKISYKDLKDGKYQLIEAVSPKDYQKITNKPILTFEVVKGSIQNIIAVNKQISEYHEEGDKHLITNTHIPPKGIIPMTGGKGILSFILIGGSMMSIAGGIYIWKRYKKSSDISREKD

SEQ ID NO: 510 - protein, 896 aa, Streptococcus agalactiae
MRKYQKFSKILTLSLFCLSQIPLNTNVLGESTVPENGAKGKLVVKKTDDQNKPLSKATFVLKPTSHSESKVEKVTAELTGEATFDNLTPGDYTLSEETAPEGYKKTTQTWQVKVESNGKTTIQNSDDKKSIIEQRQEELDKQYPLTGAYEDTKESYNLEHVKNSIPNGKLEAKAVNPYSSEGEHIREIQEGTLSKRISEVNDLDHNKYKIELTVSGKSIIKTINKDEPLDVVFVLDNSNSMKNNGKHNKAKKAAEALGTAVKDILGANSDNRVALVTYGSDIFDGRSVDVVKGFKEDPYYGLETSFTVQTNDYSYKKFTNIAADIIKKIPKEAPEAKWGGTSLGLTPEKKREYDLSKVGETFTMKAFMEADTLLSSIQRKSRKIIVHLTDGVPTRSYAINSFVKGSTYESQFERIKEKGYLDKNNYFITDDPEKIKGNGESYFLFPLDSYQTQIISGNLQKLHYLDLNLNYPKGTIYRNGPVREHGTPTKLYINSLKQKNYDIFNFGIDISGFRQVYNEDYKKNQDGTFQKLKEEAFELSDGEITELMNSFSSKPEYYTPIVTSADVSNNEILSKIQQQFEKILTKENSIVNGTIEDPMGDKINLHLGNGQTLQPSDYTLQGNDGSIMKDSIATGGPNNDGGILKGVKLEYIKNKLYVRGLNLGEGQKVTLTYDVKLDDSFISNKFYDTNGRTTLNPKSEEPDTLRDFPIPKIRDVREYPTITIKNEKKLGEIEFTKVDKDNNKLLLKGATFELQEFNEDYKLYLPIKNNNSKVVTGENGKISYKDLKDGKYQLIEAVSPKDYQKITNKPILTFEVVKGSIQNIIAVNKQISEYHEEGDKHLITNTHIPPKGIIPMTGGKGILSFILIGGAMMSIAGGIYIWKRHKKSSDASIEKD

SEQ ID NO: 511 - protein, 901 aa, Streptococcus agalactiae
MRKYQKFSKILTLSLFCLSQIPLNTNVLGESTVPENGAKGKLVVKKTDDQNKPLSKATFVLKTTAHPESKIEKVTAELTGEATFDNLIPGDYTLSEETAPEGYKKTNQTWQVKVESNGKTTIQNSGDKNSTIGQNHEELDKQYPPTGIYEDTKESYKLEHVKGSVPNGKSEAKAVNPYSSEGEHIREIPEGTLSKRISEVGDLAHNKYKIELTVSGKTIVKPVDKQKPLDVVFVLDNSNSMNNDGPNFQRHNKAKKAAEALGTAVKDILGANSDNRVALVTYGSDIFDGRSVDVVKGFKEDDKYYGLQTKFTIQTENYSHKQLTNNAEEIIKRIPTEAPRAKWGSTTNGLTPEQQKQYYLSKVGETFTMKAFMEADDILSQVDRNSQKIIVHITDGVPTRSYAINNFKLGASYESQFEQMKKNGYLNKSNFLLTDKPEDIKGNGESYFLFPLDSYQTQIISGNLQKLHYLDLNLNYPKGTIYRNGPVREHGTPTKLYINSLKQKNYDIFNFGIDISAFRQVYNEDYKKNQDGTFQKLKEEAFELSDGEITELMKSFSSKPEYYTPIVTSSDASNNEILSKIQQQFEKVLTKENSIVNGTIEDPMGDKINLQLGNGQTLQPSDYTLQGNDGSIMKDSIATGGPNNDGGILKGVKLEYIKNKLYVRGLNLGEGQKVTLTYDVKLDDSFISNKFYDTNGRTTLNPKSEDPNTLRDFPIPKIRDVREYPTITIKNEKKLGEIEFTKVDKDNNKLLLKGATFELQEFNEDYKLYLPIKNNNSKVVTGENGKISYKDLKDGKYQLIEAVSPKDYQKITNKPILTFEVVKGSIQNIIAVNKQISEYHEEGDKHLITNTHIPPKGIIPMTGGKGILSFILIGGSMMSIAGGIYIWKRYKKSSDISREKD

SEQ ID NO: 512 - protein, 237 aa, Streptococcus pyogenes
MIVRLIKLLDKLINVIVLCFFFLCLLIAALGIYDALTVYQGANATNYQQYKKKGVQFDDLLAINSDVMAWLTVKGTHIDYPIVQGENNLEYINKSVEGEYSLSGSVFLDYRNKVTFEDKYSLIYAHHMAGNVMFGELPNFRKKSFFNKHKEFSIETKTKQKLKINIFACIQTDAFDSLLFNPIDVDISSKNEFLNHIKQKSVQYREILTTNESRFVALSTCEDMTTDGRIIVIGQIQ

SEQ ID NO: 513 - protein, 241 aa, Streptococcus pyogenes; identical to SEQ ID NO: 68

SEQ ID NO: 514 - protein, 241 aa, Streptococcus pyogenes
MMMTIVQVINKAIDTLILIFCLVVLFLAGFGLWDSYHLYQQADASNFKKFKTAQQQPKFEDLLALNEDVIGWLNIPGTHIDYPLVQGKTNLEYINKAVDGSVAMSGSLFLDTRNHNDFTDDYSLIYGHHMAGNAMFGEIPKFLKKDFFNKHNKAIIETKERKKLTVTIFACLKTDAFDQLVFNPNAITNQDQQKQLVDYISKRSKQFKPVKLKHHTKFVAFSTCENFSTDNRVIVVGTIQE

SEQ ID NO: 515 - protein, 241 aa, Streptococcus pyogenes; identical to SEQ ID NO: 115

SEQ ID NO: 516 - protein, 241 aa, Streptococcus pyogenes
MMMTIVQVINKAIDTLILIFCLVVLFLAGFGLWDSYHLYQQADASNFKKFKTAQQQPKFEDLLALNEDVIGWLNIPGTHMDYPLVQGKTNLEYINKAVDGSVAMSGSLFLDTRNHNDFTDDYSLIYGHHMAGNAMFGEIPKFLKKDFFNKHNKAIIETKERKKLTVTIFACLKTDAFDQLVFNPNAITNQDQQRQLVDYISKRSKQFKPVKLKHHTKFVAFSTCENFSTDNRVIVVGTIQE

SEQ ID NO: 517 - protein, 241 aa, Streptococcus pyogenes; identical to SEQ ID NO: 247

SEQ ID NO: 518 - protein, 756 aa, Streptococcus pyogenes; identical to SEQ ID NO: 109

SEQ ID NO: 519 - protein, 523 aa, Streptococcus pyogenes
LQKRDKTNYGSANNKRRQTTIGLLKVFLTFVALIGIVGFSIRAFGAEEKSTETKKTSVIIRKYAEGDYSKLLEGATLRLTGEDIPDFQEKVFQSNGTGEKIELSNGTYTLTETSSPDGYKITEPIKFRVVNKKVFIVQKDGSQVENPNKELGSPYTIEAYNDFDEFGLLSTQNYAKFYYGKNYDGSSQIVYCFNANLKSPPDSEDHGATINPDFTTGDIRYSHIAGSDLIKYANTARDEDPQLFLKHVKKVIENGYHKKGQAIPYNGLTEAQFRAATQLAIYYFTDSVDLTKDRLKDFHGFGDMNDQTLGVAKKIVEYALSDEDSKLTNLDFFVPNNSKYQSLIGTEYHPDDLVDVIRMEDKKQEVIPVTHSLTVQKTVVGELGDKTKGFQFELELKDKTGQPIVNTLKTNNQDLVAKDGKYSFNLKHGDTIRIEGLPTGYSYTLKETEAKDYIVTVDNKVSQEAQSASENVTADKEVTFENRKDLVPPTGLTTDGAIYLWLLLLVPFGLLVWLFGRKGLKND

SEQ ID NO: 520 - protein, 744 aa, Streptococcus pyogenes; identical to SEQ ID NO: 57

SEQ ID NO: 521 - protein, 744 aa, Streptococcus pyogenes; identical to SEQ ID NO: 57

SEQ ID NO: 522 - protein, 556 aa, Streptococcus pyogenes
MQKRDKTNYGSANNKRRQTTIGLLKVFLTFVALIGIVGFSIRAFGAEEQSTFQNLLSAEYVPDTPPKPGEEPPAKTEKTETKKTSVIIRKYAEGDYSKLLEGATLKLAQIEGSGFQEQSFESSTSGQKLQLSDGTYILTETKSPDFNNQGYEIAEPITFKVTAGKVFIKGKDGQFVENQNKEVAEPYSVTAYNDFDDSGFINPKTFTPYGKFYYAKNANGTSQVVYCFNVDLHSPPDSLDKGETIDPDFNEGKEIKYTHILGADLFSYANNPRASTNDELLSQVKKVLEKGYRDDSTTYANLTSVEFRAATQLAIYYFTDSVDLDNLADYHGFGALTTEALNATKEIVAYAEDRANLPNISNLDFYVPNSNKYQSLIGTQYHPESLVDIIRMEDKQAPIIPITHKLTISKTVTGTIADKKKEFNFEIHLKSSDGQAISGTYPTNSGELTVTDGKATFTLKDGESLIVEGLPSGYSYEITETGASDYEVSVNGKNAPDGKATKASVKEDETITFENRKDLVPPTGLTTDGAIYLWLLLLVLLGLWVWLIGRKGLKND

SEQ ID NO: 523 - protein, 762 aa, Streptococcus pyogenes; identical to SEQ ID NO: 48

SEQ ID NO: 524 - protein, 698 aa, Streptococcus pyogenes; identical to SEQ ID NO: 107

SEQ ID NO: 525 - protein, 627 aa, Streptococcus pyogenes
MVSSYMFVRGEKMNNKIFLNKEASFLAHTKRKRRFAVTLVGVFFMLLACAGAIGFGQVAYAADEKTVPSHSSPNPEFPWYGYDAYGKEYPGYNIWTRYHDLRVNLNGSRSYQVYCFNIQSNYPSQKNSFIKNWFKKIEGNGKSFVDYAHTTKLGKEELEQRLLSLLYNAYPNDANGYMKGLEHLNAITVTQYAVWHYSDNSQYQFETLWESEAKEGKISRSQVTLMREALKKLIDPNLEATAVNKIPSGYRLNIFESENEAYQNLLSAEYVPDDPPKPGETSEHNPKTPELDGTPIPEDPKHPDDNLEPTLPPVMLDGEEVPEVPSESLEPALPPLMPELDGQEVPEKPSIDLPIEVPRYEFNNKDQSPLAGESGETEYITEVYGNQQNPVDIDKKLPNETGFSGNMVETEDTKEPEVLMGGQSESVEFTKDTQTGMSGQTTPQVETEDTKEPEVLMGGQSESVEFTKDTQTGMSGQTTPQIETEDTKEPEVLMGGQSESVEFTKDTQTGMSGQTTPQIETEDTKEPEVLMGGQSESVEFTKDTQTGMSGFSETATVVEDTRPKLVFHFDNNEPKVEENREKPTKNITPILPATGDIENVLAFLGILILSVLSIFSLLKNKQSNKKV

SEQ ID NO: 526 - protein, 655 aa, Streptococcus pyogenes
MTQKNSYKLSFLLSLTGFILGLLLVFIGLSGVSVGHAETRNGANKQGAFEIKKNKSQEEYNYEVYDNRNILQDGEHKLEIKRVDGTGKTYQGFCFQLTKNFPTAQGVSKKLYKKLSSSDEETLKQYASKYTSNRRGDTSGNLKKQIAKVLTEGYPTNKSDWLNGLTENEKIEVTQDAIWYFTETTVPADRSYTNRNVNSQKMKEVYQKLIDTTDIDKYEDVQFDLFVPQDTNLQAVISVEPVIESLPWTSLKPIAQKDITAKKQEISVTWTNQLVTDEKGMAYIYSVKEVDKNGELLEPKDYIKKEDGLTVTNTYVKPTSGHYDIEVTFGNGHIDITEDTTPDIVSGENQMKQIEGEDSKPIDEVTENNLIEFGKNTMPGEEDGTNSNKYEEVEDSRPVDTLSGLSSEQGQSGDMTIEEDSATHIKFSKRDIDGKELAGATMELRDSSGKTISTWISDGQVKDFYLMPGKYTFVETAAPDGYEIATAITFTVNEQGQVTVNGKATKGDAHIVMVDAYKPTKGSGQVIDIEEKLPDEQGHSGSTTEIEDSKSSDVIIGGQGQIVETTEDTQTGMHGDSGCKTEVEDTKLVQSFHFDNKESESNSEIPKKDKPKSNTSLPATGEKQHNMFFWMVTSCSLISSVFVISLKTKKRLSSC

SEQ ID NO: 527 - protein, 696 aa, Streptococcus pyogenes; identical to SEQ ID NO: 79

SEQ ID NO: 528 - protein, 733 aa, Streptococcus pyogenes; identical to SEQ ID NO: 71

SEQ ID NO: 529 - protein, 611 aa, Streptococcus pyogenes
MSSSDEETLKQYASKYTSNRRGDTSGNLKKQIAKVLTEGYPTNKSDWLNGLTENEKIEVTQDAIWYFTETTVPADRSYTNRNVNSQKMKEVYQKLIDTTDIDKYEDVQFDLFVPQDTNLQAVISVEPVIESLPWTSLKPIAQKDITAKKIWVDAPKEKPIIYFKLYRQLPGEKEVAVDDAELKQINSEGQQEISVTWTNQLVTDEKGMAYIYSVKEVDKNGELLEPKDYIKKEDQIEGEDSKPIDEVTENNLIEFGKNTMPGEEDGTNSNKYEEVEDSRPVDTLSGLSSEQGQSGDMTIEEDSATHIKFSKRDIDGKELAGATMELRDSSGKTISTWISDGQVKDFYLMPGKYTFVETAAPDGYEVATAITFTVNEQGQVTVNGKATKGDAHIVMVDAYKPTKGSGQVIDIEEKLPDEQGHSGSTTEIEDSKSSDVIIGGQGEVVDTTEDTQSGMTGHSGSTTEIEDSKSSDVIIGGQGEVVDTTEDTQSGMTGHSGSTTKIEDSKSSDVIVGGQGQIVETTEDTQTGMHGDSGRKTEVEDTKLVQSFHFDNKEPESNSEIPKKDKSKSNTSLPATGEKQHNKFFWMVTSCSLISSVFVISLKSKKRLSSC

SEQ ID NO: 530 - protein, 1161 aa, Streptococcus pyogenes; identical to SEQ ID NO: 121

SEQ ID NO: 531 - protein, 285 aa, Streptococcus pyogenes
MKKNKLLLATAILATALGTASLNQNVKAETAGVVSSGQLTIKKSITNFNDDTLLMPKTDYTFSVNPDSAATGTESNLPIKPGIAVNNQDIKVSYSNTDKTSGKEKQVVVDFMKTKEPIQFNNSFETTSLKIEKEVTGNTGDHKKAFTFTLTLQPNEYYEASSVVKIEENGQTKDVKIGEAYKFTLNDSQSVILSKLPVGINYKVEEAEANQGGYTTTATLKDGEKLSTYNLGQEHKTDKTADEIVVTNNRDTQVPTGVVGTLAPFAVLSIVAIGGVIYITKRKKA

SEQ ID NO: 532 - protein, 352 aa, Streptococcus pyogenes
LEREKMKKNKLLLATAILATALGTASLNQNVKAETAGVVTGKSLQVTKTMTYDDEEVLMPETAFTFTIEPDMTASGKEGSLDIKNGIVEGLDKQVTVKYKNTDKTSQKTKIAQFDFSKVKFPAIGVYRYMVSEKNDKKDGITYDDKKWTVDVYVGNKANNEEGFEVLYIVSKEGTSSTKKPIEFTNSIKTTSLKIEKQITGNAGDRKKSFNFTLTLQPSEYYKTGSVVKIEQDGSKKDVTIGTPYKFTLGHGKSVMLSKLPIGINYYLSEDEANKDGYTTTATLKEQGKEKSSDFTLSTQNQKTDESADEIVVTNKRDTQVPTGVVGTLAPFAVLSIVAIGGVIYITKRKKA

SEQ ID NO: 533 - protein, 344 aa, Streptococcus pyogenes; identical to SEQ ID NO: 59

SEQ ID NO: 534 - protein, 349 aa, Streptococcus pyogenes; identical to SEQ ID NO: 67

SEQ ID NO: 535 - protein, 344 aa, Streptococcus pyogenes; identical to SEQ ID NO: 75

SEQ ID NO: 536 - protein, 340 aa, Streptococcus pyogenes; identical to SEQ ID NO: 50

SEQ ID NO: 537 - protein, 183 aa, Streptococcus pyogenes; identical to SEQ ID NO: 61

SEQ ID NO: 538 - protein, 189 aa, Streptococcus pyogenes; identical to SEQ ID NO: 69

SEQ ID NO: 539 - protein, 189 aa, Streptococcus pyogenes; identical to SEQ ID NO: 117

SEQ ID NO: 540 - protein, 224 aa, Streptococcus pyogenes
LLFQRVKIFLLTIVLSLSVLFKNNERRRLLRKYWKMLFSVVMILTMLAFNQTVLAKDSTVQTSISVENVLERAGDSTPFSVALESIDAMKTIDEITIAGSGKASFSPLTFTTVGQYTYRVYQKPSQNKDYQADTTVFDVLVYVTYDEDGTLVAKVISRRAGDEEKSAITFKPKRLVKPIPPRQPNIPKTPLPLAGEVKSLLGILSIVLLGLLVLLYVKKLKSRL

SEQ ID NO: 541 - protein, 195 aa, Streptococcus pyogenes; identical to SEQ ID NO: 77

SEQ ID NO: 542 - protein, 1036 aa, Streptococcus pyogenes; identical to SEQ ID NO: 43

SEQ ID NO: 543 - protein, 1161 aa, Streptococcus pyogenes; identical to SEQ ID NO: 121

SEQ ID NO: 544 - protein, 611 aa, Streptococcus pyogenes; identical to SEQ ID NO: 529

SEQ ID NO: 545 - protein, 340 aa, Streptococcus pyogenes; identical to SEQ ID NO: 50

SEQ ID NO: 546 - protein, 467 aa, Streptococcus pyogenes
NRRETVREKILITAKKLMLACLAILAVVGLGMTRVSALSKDDTAQLKITNIEGGPTVTLYKIGEGVYNTNGDSFINFKYAEGVSLTETGPTSQEITTIANGINTGKIKPFSTENVSISNGTATYNARGASVYIALLTGATDGRTYNPILLAASYNGEGNLVTKNIDSKSNYLYGQTSVAKSSLPSITKKVTGTIDDVNKKTTSLGSVLSYSLTFELPSYTKEAVNKTVYVSDNMSEGLTFNFNSLTVEWKGKMANITEDGSVMVENTKIGIAKEVNNGFNLSFIYDSLESISPNISYKAVVNNKAIVGEEGNPNKAEFFYSNNPTKGNTYDNLDKKPDKGNGITSKEDSKIVYTYQIAFRKVDSVSKTPLIGAIFGVYDTSNKLIDIVTTNKNGYAISTQVSSGKYKIKELKAPKGYSLNTETYEITANWVTATVKTSANSKSTTYTSDKNKATDNSEQVGWLKNGI

SEQ ID NO: 547 - protein, 100 aa, Streptococcus pyogenes
MTRTNYQKKRMTCPVETEDITYRRKKIKGRRQAILAQFEPELVHHELIGDSCTCPDCHGTLTEIGSVVQRQELVFIPAQLKRINHVQHAYKCQTCSDNSL

SEQ ID NO: 548 - protein, 556 aa, Streptococcus pyogenes; identical to SEQ ID NO: 522

SEQ ID NO: 549 - protein, 301 aa, Streptococcus pyogenes
HIAGRDLFKYTVKPRDTDPDTFLKHIKKVIEKGYREKGQAIEYSGLTETQLRAATQLAIYYFTDSAELDKDKLKDYHGFGDMNDSTLAVAKILVEYAQDSNPPQLTDLDFFIPNNNKYQSLIGTQWHPEDLVDIIRMEDKKEVIPVTHNLTLRKTVTGLAGDRTKDFHFEIELKNNKQELLSQTVKTDKTNLEFKDGKATINLKHGESLTLQGLPEGYSYLVKETDSEGYKVKVNSQEVANATVSKTGITSDETLAFENNKEPVVPTGVDQKINGYLALIVIAGISLGIWGIHTIRIRKHD

SEQ ID NO: 550 - protein, 344 aa, Streptococcus pyogenes; identical to SEQ ID NO: 59

SEQ ID NO: 551 - protein, 349 aa, Streptococcus pyogenes; identical to SEQ ID NO: 67

SEQ ID NO: 552 - protein, 189 aa, Streptococcus pyogenes; identical to SEQ ID NO: 117

SEQ ID NO: 553 - protein, 117 aa, Streptococcus pyogenes
ITIAGSGKASFSPLTFTTVGQYTYRVYQKPSQNKDYQADTTVFDVLVYVTYDEDGTLVAKVISRRAGDEEKSAITFKPKRLVKPIPPRQPNIPKTPLPLAGEVKSLLGILSIVLLGL

SEQ ID NO: 554 - protein, 183 aa, Streptococcus pyogenes; identical to SEQ ID NO: 61

SEQ ID NO: 555 - protein, 467 aa, Streptococcus pyogenes; identical to SEQ ID NO: 546

SEQ ID NO: 556 - protein, 350 aa, Streptococcus pyogenes
EKEVAVDDAELKQINSEGQQEISVTWTNQLVTDEKGMAYIYSVKEVDKNGELLEPKDYIKKEDGLTVTNTYVKPTSGHYDIEVTFGNGHIDITEDTTPDIVSGENQMKQIEGEDSKPIDEVTENNLIEFGKNTMPGEEDGTNSNKYEEVEDSRPVDTLSGLSSEQGQSGDMTIEEDSATHIKFSKRDIDGKELAGATMELRDSSGKTISTWISDGQVKDFYLMPGKYTFVETAAPDGYEIATAITFTVNEQGQVTVNGKATKGDAHIVMVDAYKPTKGSGQVIDIEEKLPDEQGHSGSTTEIEDSKSSDVIIGGQGQIVETTEDTQTGMHGDSGCKTEVEDTKLVQSFHF

SEQ ID NO: 557 - protein, 655 aa, Streptococcus pyogenes; identical to SEQ ID NO: 526

SEQ ID NO: 558 - protein, 611 aa, Streptococcus pyogenes; identical to SEQ ID NO: 529

SEQ ID NO: 559 - protein, 396 aa, Streptococcus pyogenes
EKEVAVDDAELKQINSEGQQEISVTWTNQLVTDEKGMAYIYSVKEVDKNGELLEPKDYIKKEDGLTVTNTYVKPTSGHYDIEVTFGNGHIDITEDTTPDIVSGENQMKQIEGEDSKPIDEVTENNLIEFGKNTMPGEEDGTNSNKYEEVEDSRPVDTLSGLSSEQGQSGDMTIEEDSATHIKFSKRDIDGKELAGATMELRDSSGKTISTWISDGQVKDFYLMPGKYTFVETAAPDGYEVATAITFTVNEQGQVTVNGKATKGDAHIVMVDAYKPTKGSGQVIDIEEKLPDEQGHSGSTTEIEDSKSSDVIIGGQGEVVDTTEDTQSGMTGHSGSTTKIEDSKSSDVIVGGQGQIVETTEDTQTGMHGDSGRKTEVEDTKLVQSFHFDNKEPESNS

SEQ ID NO: 560 - protein, 334 aa, Streptococcus pyogenes
ATALGTASLNQNVKAETAGVVTGKSLQVTKTMTYDDEEVLMPETAFTFTIEPDMTASGKEGSLDIKNGIVEGLDKQVTVKYKNTDKTSQKTKIAQFDFSKVKFPAIGVYRYMVSEKNDKKDGITYDDKKWTVDVYVGNKANNEEGFEVLYIVSKEGTSSTKKPIEFTNSIKTTSLKIEKQITGNAGDRKKSFNFTLTLQPSEYYKTGSVVKIEQDGSKKDVTIGTPYKFTLGHGKSVMLSKLPIGINYYLSEDEANKDGYTTTATLKEQGKEKSSDFTLSTQNQKTDESADEIVVTNKRDTQVPTGVVGTLAPFAVLSIVAIGGVIYITKRKKA

SEQ ID NO: 561 - protein, 285 aa, Streptococcus pyogenes; identical to SEQ ID NO: 531

SEQ ID NO: 562 - protein, 1161 aa, Streptococcus pyogenes; identical to SEQ ID NO: 121

SEQ ID NO: 563 - protein, 344 aa, Streptococcus pyogenes; identical to SEQ ID NO: 59

SEQ ID NO: 564 - protein, 349 aa, Streptococcus pyogenes; identical to SEQ ID NO: 67

SEQ ID NO: 565 - protein, 340 aa, Streptococcus pyogenes
VWYYSDNAPISNPDESFKRESESNLVSTSQLSLMRQALKQLIDPNLATKMPKQVPDDFQLSIFESEDKGDKYNKGYQNLLSGGLVPTKPPTPGDPPMPPNQPQTTSVLIRKYAIGDYSKLLEGATLQLTGDNVNSFQARVFSSNDIGERIELSDGTYTLTELNSPAGYSIAEPITFKVEAGKVYTIIDGKQIENPNKEIVEPYSVEAYNDFEEFSVLTTQNYAKFYYAKNKNGSSQVVYCFNADLKSPPDSEDGGKTMTPDFTTGEVKYTHIAGRDLFKYTVKPRDTDPDTFLKHIKKVIEKGYREKGQAIEYSGLTETQLRAATQLAIYYFTDSAELDK

SEQ ID NO: 566 - protein, 340 aa, Streptococcus pyogenes; identical to SEQ ID NO: 50

SEQ ID NO: 567 - protein, 384 aa, Streptococcus pyogenes
PKNANGYMDKIEPLNAILVTQQAVWYYSDSSYGNIKTLWASELKDGKIDFEQVKLMREAYSKLISDDLEETSKNKLPQGSKLNIFVPQDKSVQNLLSAEYVPESPPAPGQSPEPPVQTKKTSVIIRKYAEGDYSKLLEGATLRLTGEDILDFQEKVFQSNGTGEKIELSNGTYTLTETSSPDGYKIAEPIKFRVVNKKVFIVQKDGSQVENPNKEVAEPYSVEAYSDMQDSNYINPETFTPYGKFYYAKNKDKSSQVVYCFNADLHSPPESEDGGGTIDPDISTMKEVKYTHTAGSDLFKYALRPRDTNPEDFLKHIKKVIEKGYNKKGDSYNGLTETQFRAATQLAIYYFTDSTDLKTLKTYNNGKGYHGFESMDEKTLAVTK

SEQ ID NO: 568 - protein, 1036 aa, Streptococcus pyogenes; identical to SEQ ID NO: 43

SEQ ID NO: 569 - protein, 174 aa, Streptococcus pyogenes
TASINIEVINQVDVATNKQSSDIDETFMFVIEALDKESPLPNSVTTSVKGNGKTSFEQLTFSEVGQYHYKIHQLLGKNSQYHYDETVYEVVIYVLYNEQSGALETNLVSNKLGETEKSELIFKQEYSEKTPEPHQPDTTEKEKPQKKRNGILPSTGEMVSYVSALGIVLVATIT

SEQ ID NO: 570 - protein, 344 aa, Streptococcus pyogenes; identical to SEQ ID NO: 75

SEQ ID NO: 571 - protein, 215 aa, Streptococcus pyogenes; identical to SEQ ID NO: 52

SEQ ID NO: 572 - protein, 195 aa, Streptococcus pyogenes; identical to SEQ ID NO: 77

SEQ ID NO: 573 - protein, 189 aa, Streptococcus pyogenes; identical to SEQ ID NO: 69

SEQ ID NO: 574 - protein, 189 aa, Streptococcus pyogenes; identical to SEQ ID NO: 117

SEQ ID NO: 575 - protein, 183 aa, Streptococcus pyogenes; identical to SEQ ID NO: 61

SEQ ID NO: 576 - protein, 180 aa, Streptococcus pyogenes
LMPKADYTFKVEADDNAKGKTKDGLDIKPGVIDGLENTKTIHYGNSDKTTAKEKSVNFDFANVKFPGVGVYRYTVSEVNGNKAGIAYDSQQWTVDVYVVNREDGGFEAKYIVSTEGGQSDKKPVLFKNFFDTTSLKVTKKVTGNTGEHQRSFSFTLLLTPNECFEKGQVVNILQGGETKK

SEQ ID NO: 577 - protein, 340 aa, Streptococcus pyogenes; identical to SEQ ID NO: 50

SEQ ID NO: 578 - protein, 178 aa, Streptococcus pyogenes
SVNPDSAATGTESNLPIKPGIAVNNQDIKVSYSNTDKTSGKEKQVVVDFMKVTFPSVGIYRYVVTENKGTAEGVTYDDTKWLVDVYVGNNEKGGLEPKYIVSKKGDSATKEPIQFNNSFETTSLKIEKEVTGNTGDHKKAFTFTLTLQPNEYYEASSVVKIEENGQTKDVKIGEAYKF

SEQ ID NO: 579 - protein, 627 aa, Streptococcus pyogenes; identical to SEQ ID NO: 525

SEQ ID NO: 580 - protein, 109 aa, Streptococcus pyogenes
IETEDTKEPEVLMGGQSESVEFTKDTQTGMSGFSETATVVEDTRPKLVFHFDNNEPKVEENREKPTKNITPILPATGDIENVLAFLGILILSVLSIFSLLKNKQSNKKV

SEQ ID NO: 581 - protein, 98 aa, Streptococcus pyogenes
VLMGGQSESVEFTKDTQTGMSGFSETVTIVEDTRPKLVFHFDNNEPKVEENREKPTKNITPILPATGDIENVLAFLGILILSVLSIFSLLKNKQNNKV

SEQ ID NO: 582 - protein, 10 aa, Streptococcus pyogenes
PKEKPIIYFK

SEQ ID NO: 583 - protein, 12 aa, Streptococcus pyogenes
YTFVETAAPDGY

SEQ ID NO: 584 - protein, 10 aa, Streptococcus pyogenes
PKEKPIIYFK

SEQ ID NO: 585 - protein, 12 aa, Streptococcus pyogenes
YTFVETAAPDGY

SEQ ID NO: 586 - protein, 10 aa, Streptococcus pyogenes
PKEKPIIYFK

SEQ ID NO: 587 - protein, 12 aa, Streptococcus pyogenes
YTFVETAAPDGY

SEQ ID NO: 588 - protein, 10 aa, Streptococcus pyogenes
PKEKPIIYFK

SEQ ID NO: 589 - protein, 12 aa, Streptococcus pyogenes
YTFVETAAPDGY

SEQ ID NO: 590 - protein, 10 aa, Streptococcus pyogenes
PKGISQDIPK

SEQ ID NO: 591 - protein, 10 aa, Streptococcus pyogenes
PKGYQQVTEK

SEQ ID NO: 592 - protein, 11 aa, Streptococcus pyogenes
PKMSVVSKYGK

SEQ ID NO: 593 - protein, 11 aa, Streptococcus pyogenes
PKYDAKNQEYK

SEQ ID NO: 594 - protein, 12 aa, Streptococcus pyogenes
YDLYETKAPKGY

SEQ ID NO: 595 - protein, 12 aa, Streptococcus pyogenes
YTFVETAAPDGY

SEQ ID NO: 596 - DNA, 17172 bp, Streptococcus pneumoniae
gacaagcttccttatacgaccgctttctatatcggactcttccaagttcttgctcttttaccagggactagccgttcaggtgcaacgattgtcggtggtttgttaaatggaaccagtcgttcagttgtgacagaatttaccttctatcttgggattcccgttatgtttggagctagtgccttaaagattttcaaatttgtgaaagccggagaactcttgagctttgggcaattgtttttgctcttggtcgcgatgggagtagcttttgcggtcagcatggtggctattcgcttcttgaccagctatgtgaaaaaacacgacttcaccctttttggtaaataccgtatcgtgcttggtagtgttttgctactttacagttttgtccgtttatttgtataagaaaaaccttgaaggggtaactcttcaaggttttatactcttagaaaatctcttcaaaccgcgtcagctttatctgcaacctcaaaacagtgttttgagcagcctgcggctagcttcctagtttgctctttgattttcattgagctttaaaatccagtcagggtaatccccaataggcggacacctctttctttctcgcttaattcttcatagagttgcagggctatttggcttatctgactagcatcttgtgttttttggcaagactttttcgtttggtaagagttgaaaagtcctcgtagcggattttcaaaatgacaatttttccagctttttcttgttgatgtagattgagagcgactttttctgatagaagagtcagctcttttttgatatcttcctcggcacggagaatcttcccgtaggttttctccttgccgattgatttacggatgcgattggatttgactggagagttgtgaatgccacgagcctttcgatacagatcatagcctagtctaccaaaacggtctattagggttacctcaggaacttcaagtaaatcagcaccagtaaaaacgcccatttgatgaagacgttctactgtcttttttcctactccatgaaatttggaaatatccatttgtttgagaaaatcctcagcctgttcaggtagaatcactgtcaaaccatgtggtttttgataatcactcgccattttagctaagaatttgttgtaagaaacgcctgcggaagcagttagatggagttctttccagatatctttttgaatgaggcgagcaattttgaccgctgacttgataccgagtttattttctgtcacatccaaataggcttcgtcaatgctcatgggttcaatcaaatctgtatagcgcttaaaaatagctcgaatccggagtcccacagacttgtatttctcataattccctgagataaagacagcctggggacaacgttcataagcttccttggaactcatggcagaatggacaccaaaagctcttgcctcataactacaggtagaaacgactccccgtccacctgtttgccgagggtcgcttccaataatgacaggttttcctctgagtttaggattatccctgatttccactgcagcaaaaaaggcatccatgtcaatatggatgatttttcttgacaaatcatttaacaaaggaaaaatcaacatgcctagcacctttttatactcttcgaaaatctcttcaaaccacgtcagcttccatctgcaacctcaaaacagtattttgagctgacttcgtcagttctatttacaacctcaaagcagtgctttgagcagcctgcggctagtttcctagtttgcttttcgatttccattgagtgtaactgcttattttcttttattatacccttttttctgaaaaaaagaaaaaaggactttatttttttcaaaaatataatacagtttgaaataaaatatagactgttttagaaaagaaagtgtaaaaataggaatttttcacttgttgaaatcggttactttatggtatacttgtctcatgaatgtaacagatgactgttactagaaaaaagaggacattaatatggttgttaagacagttgttgaagcacaagatatttttgacaaagcttgggaaggcttcaaaggcgtagattggaaagaaaaagcaagtgtatcacgctttgtacaagctaactacacaccttatgatggagacgaaagcttccttgcaggaccaacagagcgttcacttcacatcaagaaaattgtagaagaaactaaagcacactacgaagaaactcgtttcccaatggacactcgtccaacatctatcgctgatatccctgctggatttatcgacaaagaaaatgaagttatctttggtatccaaaatgatgaactcttcaaattgaacttcatgccaaaaggtggtatccgtatggctgaaactactttaaaagaaaatggatacgaaccagacccagctgttcacgaaatcttcactaaatatgtaacaacagttaacgacggtattttccgtgcctacacttcaaatattcgtcgcgctcgtcatgcacacactgtaactggtcttccagatgcatactcacgcggacgtatcatcggtgtttacgcacgtcttgctctttacggtgcagactacttgatgcaagaaaaagtaaacgactggaatgcaatcaaagaaatcgatgaagaaacaatccgtcttcgtgaagaagtaaaccttcaataccaagcattgcaacaagttgttcgcctgggtgacctttacggggttgatgttcgcaaaccagcgatgaacgtgaaagaagcaatccaatgggttaacattgctttcatggctgtctgccgtgtgattaacggtgctgctacatctctaggtcgtgtaccaatcgtattggacatctttgcagaacgtgaccttgctcgtggtacatttactgaatcagaaatccaagaattcgttgatgatttcgttatgaaacttcgtacagttaaatttgctcgtaccaaagcttatgaccaattgtactcaggtgacccaacctttatcacaacttctatggctggtatgggtaacgacggtcgtcaccgtgttactaagatggactaccgtttcttgaacactcttgacaacatcggtaactcaccagaaccaaacttgacagttctttggactgacaaattgccatacaacttccgtcgctactgtatgcacatgagccacaaacactcttctatccaatacgaaggtgtaacaacaatggctaaagacggatatggtgaaatgagctgtatctcatgctgtgtgtctccacttgatccagaaaatgaagaacaacgccacaacatccagtacttcggtgctcgtgtaaacgttcttaaagcccttcttactggtttgaatggtggttacgacgatgttcacaaagactacaaagtatttgatatcgaaccaatccgtgacgaagttcttgaatttgaatcagttaaagcgaactttgaaaaatctcttgactggttgactgacacttacgtagatgccttgaacatcatccactacatgactgataggtacaactacgaagctgttcaaatggccttcttgccaactaaacaacgtgccaacatgggattcggtatctgtggatttgctaacactgttgatacattgtcagctatcaaatacgctacagttaaaccaatccgtgacgaagatggctacatctacgattacgaaacaatcggtgactacccacgctggggtgaagatgacccacgttcaaacgaattggcagaatggttgatcgaagcttacacaactcgtctacgtagccacaaactatacaaagacgcagaagctacagtatcacttttgacaatcacatctaacgttgcttactctaaacaaactggtaactcaccagttcacaaaggtgtatacctcaacgaagatggttctgtgaacttgtctaaacttgaattcttctcaccaggtgctaacccatctaacaaagctagacacttgaacagatttgaacttaagaagagtggtccacgattgggtagattgtttcgataaggtggttggttgcaaaacttgaactcactttctagccttgactttagttatgcagctgacggtatctcattgactacacaagtatcacctcgcgctcttggtaagactcgtgatgaacaagttgataacttggtaacaatccttgatggttacttcgaaaacggtggacaacacgttaacttgaacgttatggacttgaacgatgtttacgaaaaaatcatgtcaggcgaagacgttatcgtacgtatctctggatactgtgtaaacactaaatacctcactccagaacaaaaaactgaattgacacaacgtgtcttccacgaagttctttcaatggatgacgccttggatgcattgagctaatcaagttcttgaataataaaaagggctctttgtcaactgtagtgggttgaagaaaagctaagctcgagaaaggacaaattttgtcctttcttttttgatgttcagagcgatgaaaatccgttttttgaagttttcaaagttccgaaaaccaaaggcattgcgcttgatgtctttgatgagtttgttagtggcctcaagtttagcgttagaataaggcaattcaatggcgttagtgatgtagtttttatagcaaataaatgtgctcaaagtggttttaaaggtgcggttgagatgaggtaacgtgtcttgaattaagccccaaaactggtcagtattcttctcttgtagatgaaataggagtagttgatacaggtcatagtaatctttaagttcaggtactagagtaaagattttcttcagacactccctaggagttaaggtctctctgaaagttctagcatagaaaggcttaagagagagtttccgactatcttttaggataaatttccagtaatatttaagagctctgtattccagagatttatcatcaaattgcttcatgatgttgattctagtctgattaagagccctgctcatgtgttggacaatgtggaaacgatcgagaacaattttagcattgggaaataatttcttaatgagagggatataacttccagacatatcaacagtgacgactttaactttttttctagcttctttcgagtacttgaagaaatgatttcggatggttgtttgacgtctgttatcaagaatggtcatgattttcttagtgttgaaatcctgagcaatgaaagccaatttccccttctggtaggagaattcatcccaggagaggatttcaggcaaagtggtgtaatcctcttggaaatgaaattgcttgagcttacgatagacggtagaggtagaggtagagatggctaatttagaagcgatatgtgtaagagcctctctgttgagtaggagttgggcaattttctgtctcaccatttccgagatttggcaatttttctgaacgagagttgtttcagctacagtgactttccgacaggacttgcattgaaatcgtctctttttcaaatgaatgaggctagggaaaccaccaatctcgataaaagggattttagaaggcttttggaagtcgtatttgatttgttttcctttacagtgtttacatttaggtgggtgataatcaagtgtagcgaagacttcgatatgggtatcgtgctgaatggctttatttaaggtgatgtttttgtcttttattccgatgagtaatgtggtatgattgatgtgttccataagatactttctaatgagttgtttaggcgcttttcattataagtcttatgggacttttttgatactcaaaaagccctataatctccacagtgggatttacccactacagaaattatagagccagaaaaaacacttttgttcactagcagaaactagagagcagaagtgtttttctgttcagatttacccaaaactgggaaatatggggataagaatagagatggcttaggaagcccctttttgtgtgtagacagtacgatgaacttataacaaatagtgagcctttttagcaatcattgcgacccgtttgtcaaaagcctcttttcggatatctacaattgtctgatagatgagacgctgttggctaacatgcaaatctaaggcaatcgtcaaaaagtgatgtttccctttgggatactgctttttaacgtaaggcaggtattctttcgttgtaataataatcaatggctctgtcaaatgctcctctgaaggaggaggactaattagaatattgtatcctgtaacagaggcaactttgtcagtaaaattccgtaaaataatggactttattaagtttacatctgcttgattatttaaaatgataaaaatcgggatagcaggtagtgaggaaaagatggtttctgtcaagtagagtgagaaaaggtacagccgatgctggtcgataactccttcaatcttctgctcagtcatccactcttgaacaattgctttcgaaatatgatacagtggcttgtcgctttcaatcccataatgttcgtaataattataatagggaactagattttgtaaaccaaacaaaaacgttcttgttaagaaagtcagtgctgttaaaaaagaaagagaattcgaaatgtcatttcctaagatattcttgaacttggatagtagatgctttcctcttgtatgctgaagaatcagttgaatagtatgagtctttttttcttgattccatttgtccttggaaaacgaagaattagcagaacaataaaccaaaaagatataatccagttcttcctgagtaaaagtcatgttggcatgtggctctaagtaagtttggcaatgttccatcaaaatcggatacataaagaggttttttaatttttcaaactctttggactcagggaactcaagtggaaattcccgacgtttccaagtgagtgccactagtatgctaaaatgaacatactcgtcaggtgtgatttctaacagttcatgactgagttgagaattagactgcacaatcatatgtgtgacccaatccatacttccatcattcaaatcataaatctcaataccaaaatgaaactggaggagtgcaattaaaaaacgaatgcgatattcaggaccaactacttgatttttcacaaggtccaaacctactgaacgtagtaacaagccacacttttgtcgtacgcggtagcctgttgcgatggaaatatactctttttgtgtaaattcgttaaagctttgattaccttgtagtagaaagaagcggagtatttttaaaatagttgattggttataaagctgatggaagtaataattcgtttgatgagaatggtgttcgattaattgaacttgttgcgtatctaaattaaatgtcaactcttcctcgaatgtttcttgtaattcctgcaaaatgcttaggagacttttagattgtaatgaagttaaagtagacagttcatctagttcaatagaccgaatatccaataatatatttaaaatggtaattttatctgtaattcttttttcaatgtatttgtttagcatagttaccgaatcttagttgcatatagataattttaattattataatacaaaagaaactaattgtcttgtcaaaaaggttgtggaatttccgactttattgataaaacagcatgtaataaaaggcattttaaagatagtaatgagtattggtggagttttatggcttattttttttattagaccgtaaaatttctatcattactcataaccacctcaaaataccgaataaaaaaaataatctaaatatttttttatcaaatattgtcgttctataaaaaaatatgtgataaaaatatctattgtgatggaagttgttttaatttatactaggatagttaatagtaatactatactatactatattgtatacaagtgtgtcattgccaggttgagaagatagctataacgcacttttatacgcttttgctacgtttgttagtgaacggattaactcagtgagataaattttatcagaacataagtaatccgtttcttcgtgtatacagattgaaagtacctatgaatcatagaaggattaacttgttctatgaataatgcttaacagggagacacacatgaaaaaagtaagaaagatatttcagaaggcagttgcaggactgtgctgtatatctcagttgacagctttttcttcgatagttgctttagcagaaacgcctgaaaccagtccagcgataggaaaagtagtgattaaggagacaggcgaaggaggagcgcttctaggagatgccgtctttgagttgaaaaacaatacggatggcacaactgtttcgcaaaggacagaggcgcaaacaggagaagcgatattttcaaacataaaacctgggacatacaccttgacagaagcccaacctccagttggttataaaccctctactaaacaatggactgttgaagttgagaagaatggtcggacgactgtccaaggtgaacaggtagaaaatcgagaagaggctctatctgaccagtatccacaaacagggacttatccagatgttcaaacaccttatcagattattaaggtagatggttcggaaaaaaacggacagcacaaggcgttgaatccgaatccatatgaacgtgtgattccagaaggtacactttcaaagagaatttatcaagtgaataatttggatgataaccaatatggaatcgagttgacggttagtggtaaaacgacggttgaaacgaaagaagcctctactccgctagatgttgttattctattagataactccaatagtatgagtaatattcgacataatcatgcccatcgagcggaaaaagcgggagaagcgacacgagcccttgtagataagattacctccaatccagataatcgagtagcacttgtgacttatggctcaactatctttgacggttcagaagctactgtggaaaaaggggtagcagatgcgaacggaaaaatattgaatgactcagctttatggacgttcgatcgtacgacgtttacagctaaaacttataattatagctttttaaatctcacatcagatcctactgatattcaaactattaaggataggattccatcagatgcagaggaattgaacaaagacaaattgatgtatcaattcggcgcgacttttacccagaaggctttgatgaccgctgatgatatcttgacaaagcaggcaagaccaaacagtaaaaaggttattttccacattacagatggtgttccgactatgtcatatccaattaattttaaatatacaggaacgacgcaatcgtacagaactcagctgaataattttaaagcaaaaactccaaatagtagcgggatattactggaggactttgttacatggtcagcagatggtgaacataagattgttcgtggagatggtgaaagttatcagatgtttacgaagaaacctgtaacagaccaatacggagttcatcaaatactttcaatcacctccatggagcagagagctaaattagtttcagcgggatataggttctatggaactgacttgtatttatattggcgtgatagtattctagcctatccatttaactctagtaccgattggattaccaaccatggtgaccctacgacttggtattataacggaaatatggctcaggatggctatgatgtcttcactgttggggttggtgtaaacggggatcctggtacggatgaagcaacggctactagatttatgcagagcatctctagttctcctgacaactacactaacgtagcagatccatctcagattttacaagaattgaatcgctacttctatactatcgtcaatgagaagaaatctatcgaaaatggtacgattacagacccgatgggtgaactaattgatttccaattgggagcagatggaaggtttgatccagcggattacactttaactgcaaacgatggtagttcgttggtgaataatgtccctactgggggaccacaaaatgatggtggcttgctaaaaaatgcaaaagtgttctatgatacgactgagaaaaggattcgtgtaacaggtttgtaccttggaacgggtgaaaaagttacattgacttataatgttcgcttgaatgaccaatttgtaagcaataaattctatgacacgaatggtcgaacaaccctacaccctaaggaagtagaaaagaacacagtgcgcgacttcccgattcctaagattcgtgatgtacgaaagtatccagaaatcacaattccaaaagagaaaaaacttggtgaaattgagtttattaagatcaataagaatgataaaaaaccactgagagatgcggtctttagtcttcaaaaacaacatccggattatccagatatttatggagctattgatcaaaatggcacttatcaaaatgtgagaacaggtgaagatggtaagttgacctttaaaaatctgtcagatgggaaatatcgattatttgaaaattctgaaccagctggttataaacccgttcaaaataagcctatcgttgccttccaaatagtaaatggagaagtcagagatgtgacttcaatcgttccacaagatataccagcgggttacgagtttacgaatgataagcactatatcacaaatgagccaattcctccaaaaagagaatatcctcgaactggtggtatcggaatgttgccattctatctgataggttgcatgatgatgggaggagttctattatacacacggaaacatccgtaaagtgtagcaatgagaaatgataatatcgatactctgagcgatacttttaagaagtagcactcaagaagagatttaagtttacttggtgaaaacagttttcttcgccaagtaaaccaccattgaaaggggagatgttttcgaaaacttgcacagaaaaaaggattattattgtcatgtgtaattcattacattgctcacagttgattttaagagatatgaataaggagaaatcatgaaatcaatcaacaaatttttaacaatgcttgctgccttattactgacagcgagtagcctgttttcagctgcaacagtttttgcggcggacaatgttagtacagcaccagatgctgttactaaaactttaacaatccataagttactgctctcagaagatgatttaaagacttgggatacaaacggtcctaaaggatatgatggaactcaatctagtttaaaagatttaactggagttgtagctgaggaaattccaaatgtatactttgaattacaaaagtataatttgactgatggtaaggaaaaagaaaatcttaaagatgatagtaaatggacaacagttcatggtggtttgacaactaaagatggacttaaaattgaaaccagtactcttaaaggtgtgtatcgtattcgtgaggatagaacaaagactacctatgttggtcctaatgggcaagtattaacaggttcaaaagccgtacctgctcttgtaactcttccacttgttaacaataatggtacagtaattgatgcacatgttttccctaaaaattcatataataaaccagttgtagataaaagaattgctgatactttgaattataacgatcaaaatggtctgtctatcggtactaaaatcccatatgttgttaatacaacaattccaagtaatgcaacatttgcaacttcattttggtcagatgaaatgacagaaggtctaacttataatgaagatgtaacaattactttgaataatgtagctatggatcaagctgattatgaagtcactaaaggaaataatggctttaacttaaaattaacagaagcaggtttagctaaaattaatggtaaggatgcagaccaaaaaatccaaattacttactcagctactttgaactcacttgctgttgcagacattcctgaaagtaacgatattacatatcattacggaaatcatcaagatcatgggaatactccaaaaccaactaaacctaataatggtcaaattacagtaactaagacatgggacagtcaacctgctcctgagggggtgaaagcgactgttcaacttgtaaatgccaagactggtgagaaagtcggtgctcctgtagaactttcagaaaataattggacatatacttggagtggtctagataattctattgaatacaaagttgaagaagaatataatggatactcagctgaatacacagtagagagcaaagggaagttgggggtaaaaaactggaaagataataacccagctccaatcaatcctgaagaaccacgtgtaaaaacatacggtaaaaagtttgtcaaagtagaccaaaaagatactcgtctagaaaatgcgcagttcgttgttaaaaaagcagatagcaataaatatattgcctttaagtcaactgcacaacaagctgcagatgaaaaagcagcagcaactgcaaaacaaaaattggatgcagcggtagcagcttacacaaatgctgcagataagcaagccgctcaagctctagtagatcaagcacagcaagaatacaatgtagcttacaaagaagccaaatttggttatgttgaagtagctggaaaagatgaagcaatggttcttacttctaatacggatggtcaattccaaatttcaggtcttgctgctggtacttataaattagaagaaattaaagctccagaaggttttgcgaaaattgatgatgtagaatttgttgttggagcaggttcttggaatcaaggtgagtttaattacttaaaagatgttcaaaagaatgacgctacaaaagtagtcaacaaaaaaatcactatcccacaaacgggtggtattggtacaattatctttgctgtagcgggggctgcgattatgggtattgcagtgtacgcatatgttaaaaacaacaaagatgaggatcaacttgcttaagtaagagagaaaggagccattgatgacaatgcagaaaatgcagaaaatgattagtcgtatcttctttgttatggctctgtgtttttctcttgtatggggtgcacatgcagtccaagcgcaagaagatcacacgttggtcttgcaattggagaactatcaggaggtggttagtcaattgccatctcgtgatggtcatcggttgcaagtatggaagttggatgattcgtattcctatgatgatcgggtgcaaattgtaagagacttgcattcgtgggatgagaataaactttcttctttcaaaaagacttcgtttgagatgaccttccttgagaatcagattgaagtatctcatattccaaatggtctttactatgttcgctctattatccagacggatgcggtttcttatccagctgaatttctttttgaaatgacagatcaaacggtagagcctttggtcattgtagcgaaaaaaacagatacaatgacaacaaaggtgaagctgataaaggtggatcaagaccacaatcgcttggagggtgtcggctttaaattggtatcagtagcaagagatggttctgaaaaagaggttcccttgattggagaataccgttacagttcttctggtcaagtagggagaactctctatactgataaaaatggagagatttttgtgacaaatcttcctcttgggaactatcgtttcaaggaggtggagccactggcaggctatgctgttacgacgctggatacggatgtccagctggtagatcatcagctggtgacgattacggttgtcaatcagaaattaccacgtggcaatgttgactttatgaaggtggatggtcggaccaatacctctcttcaaggggcaatgttcaaagtcatgaaagaagaaagcggacactatactcctgttcttcaaaatggtaaggaagtagttgtaacatcagggaaagatggtcgtttccgagtggaaggtctagagtatgggacatactatttatgggagctccaagctccaactggttatgttcaattaacatcgcctgtttcctttacaatcgggaaagatactcgtaaggaactggtaacagtggttaaaaataacaagcgaccacggattgatgtgccagatacaggggaagaaaccttgtatatcttgatgcttgttgccattttgttgtttggtagtggttattatcttacgaaaaaaccaaataactgatattcaatgtacatcattatgaaaaagatagcaggctgaagggaagaccagagtactctgaggtgatgttaatcaggaatcatggtgatgtggcatgaatcacaataacggatatgaggctgggcagattgtgccagcctcattgtgggttattgtttgtaaaacgataggactggtctggtaatcattttaggaatggacaggactgggattctgatttaaaatggatggtgaatcagaaagaaatgagattttctcgtttctcttagcagataggattgtctgttaggaaaagcgataaaatgatgagtttgaagataaagggatgctgataaaaatggtaaaaacaaaaaagcaaaaacgaaataatctcctattaggagtggtatttttcattggaatggcggtaatggcgtatccgctggtgtctcgcttgtattatcgagtggaatcaaatcaacaaattgctgactttgataaggaaaaagcaacgttggatgaggctgacattgatgaacgaatgaaattggcacaagccttcaatgactctttgaataatgtagtgagtggcgatccttggtcggaagaaatgaagaaaaaagggcgagcagagtatgcacgtatgttagaaatccatgagcggatggggcatgtggaaatccccgttattgacgtggatttgccggtttatgctggtactgctgaagaggtattgcagcaaggggctgggcatctagagggaacttctctgccgatcggaggcaattcgacccatgcggtgattacggcacatacaggtttgccaacagctaagatgtttacggatttgaccaaacttaaagttggggataagttttatgtgcacaatatcaaggaagtgatggcctatcaagtggatcaagtaaaggtgattgagccgacgaactttgatgatttattgattgtaccaggtcatgattatgtgaccttgctgacttgtacgccatacatgatcaatacccatcgtctattggttcgggggcatcggataccgtacgtagcagaggttgaggaagaatttattgcagcaaacaaactcagtcatctctatcgctacctgttttatgtggcagttggtttgattgtgattcttttatggattattcgacgcttgcgcaagaagaaaaaacaaccggaaaaggctttgaaggcgctgaaagcagcaaggaaggaagtgaaggtggaggatggacaacagtagacgttcacgaaaaaaaggcacaaaaaagaagaaacatccgctgatccttcttctgattttcttagtaggattcgccgttgcgatatatccattggtgtctcgttattattatcgtattgagtcaaacgaggttattaaagagtttgatgagacggtttcccagatggataaggcagaacttgaggagcgttggcgcttggctcaagccttcaatgcgaccttgaaaccatctgaaattcttgatccttttacagagcaagagaaaaagaaaggcgtctcagaatatgccaatatgctaaaggtccatgagcggattggctatgtggaaattcctgcgattgatcaggaaattccgatgtatgtcggaacgagtgaggaaattcttcagaagggcgcaggattgctagagggagcttcgttaccggttggtggtgaaaatacccacacagttgtcactgctcatagaggattaccgacggcagaactgtttagtcaattggataagatgaaaaaaggggatgtcttttatcttcacgttttagaccaggtgttggcctaccaagtggatcagattttgacggttgagccaaatgactttgagcctgtcttgattcaacatggggaagattatgcgaccttgttgacctgtacaccgtatatgattaacagtcatcgtctgttggtacgtgggaagcggattccgtatacggcaccaattgcagagcgaaatcgagcggtgagagagcgtgggcaattctggttgtggttattgctagcggcgttggttatgattctggtattgagttacggggtgtatcgtcatcgtcgcattgtcaaagggctagaaaaacaattggaggagcatcatgtcaaaggctaagctacagaaattactagggcagtctttaggacaagtaaaaggtcatgagatattttcagaatctgtgacggccgacagttaccaagagcaattgcaacggtcgcttgattacaatcaacgcttggattcgcaaaatcgtattgtagatccttttttggcggaagggtatgaggtaaattaccaagtgtctgacgatcctgatgcagtctacggctatttgtcgattccgagtttggaaatcatggagccagtttatctaggagcggattaccatcatttagcaatggggttggcccatgtggatgggacgcctcttcctgttgagggaaaagggattcgttcagtgattgctgggcaccgtgcagaaccaagccatgtctttttccgccatttggatcagctaaaagttggagatgctctttattatgataatggccaggaaattgtagaatatcagatgatggacacagagattattttaccgtcggaatgggaaaaattagaatcggttagctctaaaaatatcatgaccttgataacctgcgatccgattcctacctttaataaacgcttattagtgaattttgaacgagtcgctgtttatcaaaaatcagatccacaaacagctgcagttgcgagggttgcttttacgaaagaaggacaatctgtatcgcgtgttgcaacctctcaatggttgtaccgtgggctagtggtactggcatttctgggaatcctgtttgttttgtggaagctagcacgtttactacgagggaaataaaaagaaatgaaaggaaagctaaggctgttcctttttccggctctttgtcaactgtagtgggttgaaaaaaagctaagctcgagaaaggacaaattttgtcctttcttttttgatattcagagcgataaaaatccgttttttgaagttttcaaa

SEQ ID NO: 597 - protein, 774 aa, Streptococcus pneumoniae
MVVKTVVEAQDIFDKAWEGFKGVDWKEKASVSRFVQANYTPYDGDESFLAGPTERSLHIKKIVEETKAHYEETRFPMDTRPTSIADIPAGFIDKENEVIFGIQNDELFKLNFMPKGGIRMAETTLKENGYEPDPAVHEIFTKYVTTVNDGIFRAYTSNIRRARHAHTVTGLPDAYSRGRIIGVYARLALYGADYLMQEKVNDWNAIKEIDEETIRLREEVNLQYQALQQVVRLGDLYGVDVRKPAMNVKEAIQWVNIAFMAVCRVINGAATSLGRVPIVLDIFAERDLARGTFTESEIQEFVDDFVMKLRTVKFARTKAYDQLYSGDPTFITTSMAGMGNDGRHRVTKMDYRFLNTLDNIGNSPEPNLTVLWTDKLPYNFRRYCMHMSHKHSSIQYEGVTTMAKDGYGEMSCISCCVSPLDPENEEQRHNIQYFGARVNVLKALLTGLNGGYDDVHKDYKVFDIEPIRDEVLEFESVKANFEKSLDWLTDTYVDALNIIHYMTDRYNYEAVQMAFLPTKQRANMGFGICGFANTVDTLSAIKYATVKPIRDEDGYIYDYETIGDYPRWGEDDPRSNELAEWLIEAYTTRLRSHKLYKDAEATVSLLTITSNVAYSKQTGNSPVHKGVYLNEDGSVNLSKLEFFSPGANPSNKAKGGWLQNLNSLSSLDFSYAADGISLTTQVSPRALGKTRDEQVDNLVTILDGYFENGGQHVNLNVMDLNDVYEKIMSGEDVIVRISGYCVNTKYLTPEQKTELTQRVFHEVLSMDDALDALS

SEQ ID NO: 598 - protein, 420 aa, Streptococcus pneumoniae
ARSLVFKTREKKINLAIFIRKKFNEFNRFGFANRKIDKILKNTAELKANSYPLEIANTIYNKYCIFTSLTTKFTRNLHPLTDQILGWFQDTNKEQLHFLLLQYLDYYDKLEPVLTFIKKLCERPTLTERFTRAYFPKLSLKRSDKLIFKWYYKLARYELSKDDFQKMINIRTQNLARSMHQVIHFRDLVIKANPFLKKILPIYSGSMDVTVVKVKKRAEKSYKFFHNRITTQRRNDLITMIKKTNFDQAIFALKGKQYSFEDWSLIEPLTTYDEQFHFQKLKRYVTSTSTSIALKSAIHTLAERNLLLQAIKQRVMESIQCNKQVLTTEAVTVKRCSKCQFRRKKLHILSPFGGIEIFPIKSPKQFDYKIQKGKCHKCKPPHYDLTAFVEIHTDHQIAKNLTINKDKIGILLTTHNIHEM

SEQ ID NO: 599 - protein, 509 aa, Streptococcus pneumoniae
LLYHAKKAIMAVRKDFAEKRIDVITQYILRQQSVHLDLAITLFHHKGKPYQKKVYPLYEKTTIIILPETLHEESPPPSILINYGTVSAVKDTFNRLIISKILNVDAQNNLIIFIPIAPLSSFITETLYLSFLYLRHQDIVGEIKQETMWEQVIAKSIHYLPKDSEIGYHEYYNYYPVLNQLGFLFTRTLFTLATLFSLSNSIDNGLINKFKSLLHKGRTHQLILQITHTKKEQNWKDKSFSSNASCYVLFIYDLEEQTFTMNAHPELYTQCHEMLIPYMFLNKLKEFEKSEPFELPFERRKWTLAVLISFHVYEDPTIELLEHSLQSNSQVIMHTVWDMSGDNLDYIEIGFHFQLLAILFRIRYEPGVVQNKVLDLGVSRLLLGCKQRVRYGTAISIYEKQTFENFSQNGQLLFFRLIKLITSQNYLQHFYYNTQHSHHEILQVQQTDLNFTLEEEFTEQLEQLISLLSKSQLSTLTSLEDLEISRIDLLINLITIKDTIRKEIYKNLM

SEQ ID NO: 600 - protein, 891 aa, Streptococcus pneumoniae
MLNRETHMKKVRKIFQKAVAGLCCISQLTAFSSIVALAETPETSPAIGKVVIKETGEGGALLGDAVFELKNNTDGTTVSQRTEAQTGEAIFSNIKPGTYTLTEAQPPVGYKPSTKQWTVEVEKNGRTTVQGEQVENREEALSDQYPQTGTYPDVQTPYQIIKVDGSEKNGQHKALNPNPYERVIPEGTLSKRIYQVNNLDDNQYGIELTVSGKTTVETKEASTPLDVVILLDNSNSMSNIRHNHAHRAEKAGEATRALVDKITSNPDNRVALVTYGSTIFDGSEATVEKGVADANGKILNDSALWTFDRTTFTAKTYNYSFLNLTSDPTDIQTIKDRIPSDAEELNKDKLMYQFGATFTQKALMTADDILTKQARPNSKKVIFHITDGVPTMSYPINFKYTGTTQSYRTQLNNFKAKTPNSSGILLEDFVTWSADGEHKIVRGDGESYQMFTKKPVTDQYGVHQILSITSMEQRAKLVSAGYRFYGTDLYLYWRDSILAYPFNSSTDWITNHGDPTTWYYNGNMAQDGYDVFTVGVGVNGDPGTDEATATRFMQSIWSSSPDNYTNVADPSQILQELNRYFYTIVNEKKSIENGTITDPMGELIDFQLGADGRFDPADYTLTANDGSSLVNNVPTGGPQNDGGLLKNAKVFYDTTEKRIRVTGLYLGTGEKVTLTYNVRLNDQFVSNKFYDTNGRTTLHPKEVEKNTVRDFPIPKIRDVRKYPEITIPKEKKLGEIEFIKINKNDKKPLRDAVFSLQKQHPDYPDIYGAIDQNGTYQNVRTGEDGKLTFKNLSDGKYRLFENSEPAGYKPVQNKPIVAFQIVNGEVRDVTSIVPQDIPAGYEFTNDKHYITNEPIPPKREYPRTGGIGMLPFYLIGCMMMGGVLLYTRKHP

SEQ ID NO: 601 - protein, 644 aa, Streptococcus pneumoniae; identical to SEQ ID NO: 174

SEQ ID NO: 602 - protein, 401 aa, Streptococcus pneumoniae; identical to SEQ ID NO: 175

SEQ ID NO: 603 - protein, 304 aa, Streptococcus pneumoniae; identical to SEQ ID NO: 176

SEQ ID NO: 604 - protein, 249 aa, Streptococcus pneumoniae
VSRYYYRIESNEVIKEFDETVSQMDKAELEERWRLAQAFNATLKPSEILDPFTEQEKKKGVSEYANMLKVHERIGYVEIPAIDQEIPMYVGTSEEILQKGAGLLEGASLPVGGENTHTVVTAHRGLPTAELFSQLDKMKKGDVFYLHVLDQVLAYQVDQILTVEPNDFEPVLIQHGEDYATLLTCTPYMINSHRLLVRGKRIPYTAPIAERNRAVRERGQFWLWLLLAALVMILVLSYGVYRHRRIVKG

SEQ ID NO: 605 - protein, 295 aa, Streptococcus pneumoniae
MSKAKLQKLLGLEKQLEEHHVKGYLLMLVALVIPVYCFGQMVLQSLGQVKGHEIFSESVTADSYQEQLQRSLDYNQRLDSQNRIVDPFLAEGYEVNYQVSDDPDAVYGYLSIPSLEIMEPVYLGADYHHLAMGLAHVDGTPLPVEGKGIRSVIAGHRAEPSHVFFRHLDQLKVGDALYYDNGQEIVEYQMMDTEIILPSEWEKLESVSSKNIMTLITCDPIPTFNKRLLVNFERVAVYQKSDPQTAAVARVAFTKEGQSVSRVATSQWLYRGLVVLAFLGILFVLWKLARLLRGK

SEQ ID NO: 606 - protein, 509 aa, Streptococcus pneumoniae; identical to SEQ ID NO: 87

SEQ ID NO: 607 - protein, 509 aa, Streptococcus pneumoniae; identical to SEQ ID NO: 87

SEQ ID NO: 608 - protein, 509 aa, Streptococcus pneumoniae; identical to SEQ ID NO: 87

SEQ ID NO: 609 - protein, 509 aa, Streptococcus pneumoniae; identical to SEQ ID NO: 87

SEQ ID NO: 610 - protein, 509 aa, Streptococcus pneumoniae; identical to SEQ ID NO: 87

SEQ ID NO: 611 - protein, 509 aa, Streptococcus pneumoniae; identical to SEQ ID NO: 87

SEQ ID NO: 612 - protein, 509 aa, Streptococcus pneumoniae; identical to SEQ ID NO: 87

SEQ ID NO: 613 - protein, 509 aa, Streptococcus pneumoniae; identical to SEQ ID NO: 87

SEQ ID NO: 614 - protein, 509 aa, Streptococcus pneumoniae; identical to SEQ ID NO: 87

SEQ ID NO: 615 - protein, 509 aa, Streptococcus pneumoniae; identical to SEQ ID NO: 87

SEQ ID NO: 616 - protein, 823 aa, Streptococcus pneumoniae
MKKVRKIFQKAVAGLCCISQLTAFSSIVALAETPETSPAIGKVVIKETGEGGALLGDAVFELKNNTDGTTVSQRTEAQTGEAIFSNIKPGTYTLTEAQPPVGYKPSTKQWTVEVEKNGRTTVQGEQVENREEALSDQYPQTGTYPDVQTPYQIIKVDGSEKNGQHKALNPNPYERVIPEGAEKAGEATRALVDKITSNPDNRVALVTYGSTIFDGSEATVEKGVADANGKILNDSALWTFDRTTFTAKTYNYSFLNLTSDPTDIQTIKDRIPSDAEELNKDKLMYQFGATFTQKALMTADDILTKQARPNSKKVIFHITDGVPTMSYPINFKYTGTTQSYRTQLNNFKAKTPNSSGILLEDFVTWSADGEHKIVRGDGESYQMFTKKPVTDQYGVHQILSITSMEQRAKLVSAGYRFYGTDLYLYWRDSILAYPFNSSTDWITNHGDPTTWYYNGNMAQDGYDVFTVGVGVNGDPGTDEATATRFMQSISSSPDNYTNVADPSQILQELNRYFYTIVNEKKSIENGTITDPMGELIDFQLGADGRFDPADYTLTANDGSSLVNNVPTGGPQNDGGLLKNAKVFYDTTEKRIRVTGLYLGTGEKVTLTYNVRLNDQFVSNKFYDTNGRTTLHPKEVEKNTVRDFPIPKIRDVRKYPEITIPKEKKLGEIEFIKINKNDKKPLRDAVFSLQKQHPDYPDIYGAIDQNGTYQNVRTGEDGKLTFKNLSDGKYRLFENSEPAGYKPVQNKPIVAFQIVNGEVRDVTSIVPQDIPAGYEFTNDKHYITNEPIPPKREYPRTGGIGMLPFYLIGCMMMGGVLLYTRKNP

SEQ ID NO: 617 - protein, 883 aa, Streptococcus pneumoniae; identical to SEQ ID NO: 188

SEQ ID NO: 618 - protein, 883 aa, Streptococcus pneumoniae; identical to SEQ ID NO: 195

SEQ ID NO: 619 - protein, 883 aa, Streptococcus pneumoniae; identical to SEQ ID NO: 195

SEQ ID NO: 620 - protein, 883 aa, Streptococcus pneumoniae; identical to SEQ ID NO: 195

SEQ ID NO: 621 - protein, 883 aa, Streptococcus pneumoniae; identical to SEQ ID NO: 195

SEQ ID NO: 622 - protein, 886 aa, Streptococcus pneumoniae; identical to SEQ ID NO: 223

SEQ ID NO: 623 - protein, 886 aa, Streptococcus pneumoniae
MKKVRKIFQKAVAGLCCISQLTAFSSIVALAETPETSPAIGKVVIKETGEGGALLGDAVFELKNNTNGTTVSQRTEAQTGEAIFSNIKPGTYTLTEAQPPVGYKPSTKQRTVEVEKNGRTTVQGEQVENREEALSDQYPQTGTYPDVQTPYQIIKVDGSEKNGQHKALNPNPYERVIPEGTLSKRIYQVNNLDDNQYGIELTVSGKTVYERKDKSVPLDVVILLDNSNSMSNIRNKNARRAERAGEATRSLIDKITSDPENRVALVTYASTIFDGTEFTVEKGVADKNGKRLNDSLFWNYDQTSFTTNTKDYSYLKLTNDKNDIVELKNKVPTEAEDHDGNRLMYQFGATFTQKALMKADEILTQQARQNSQKVIFHITDGVPTMSYPINFNHATFAPSYQNQLNVFFSKSPNKDGILLSDFITQATSGEHTIVRGDGQSYQMFTDKTVYEKGAPAAFPVKPEKYSEMKAVGYAVIGDPINGGYIWLNWRESILAYPFNSNTAKITNHGDPTRWYYNGNIAPDGYDVFTVGIGINGDPGTDEATATSFMQSISSKPENYTNVTDTTKILEQLNRYFHTIVTEKKSIENGTITDPMGELIDLQLGTDGRFDPADYTLTANDGSRLENGQAVGGPQNDGGLLKNAKVFYDTTEKRIRVTGLYLGTGEKVTLTYNVRLNDQFVSNKFYDTNGRTTLHPKEVEKNTVRDFPIPKIRDVRKYPAITIAKEKKLGEIEFIKINKNDKKPLRDAVFSLQKQHPDYPDIYGAIDQNGTYQNVRTGEDGKLTFKNLSDGKYRLFENSEPAGYKPVQNKPIVAFQIVNGEVRDVTSIVPQDIPAGYEFTNDKHYITNEPIPPKREYPRTGGIGMLLFYLIGCMMMGGVLLYTRKHP

SEQ ID NO: 624 - protein, 886 aa, Streptococcus pneumoniae; identical to SEQ ID NO: 230

SEQ ID NO: 625 - protein, 886 aa, Streptococcus pneumoniae
MKKVRKIFQKAVAGLCCISQLTAFSSIVALAETPETSPAIGKVVIKETGEGGALLGDAVFELKNNTDGTTVSQRTEAQTGEAIFSNIKPGTYTLTEAQPPVGYKPSTKQWTVEVEKNGRTTVQGEQVENREEALSDQYPQTGTYPDVQTPYQIIKVDGSEKNGQHKALNPNPYERVIPEGTLSKRIYQVNNLDDNQYGIELTVSGKTVYEQKDKSVPLDVVILLDNSNSMSNIRNKNARRAERAGEATRSLIDKITSDSENRVALVTYASTIFDGTEFTVEKGVADKNGKRLNDSLFWNYDQTSFTTNTKDYSYLKLTNDKNDIVELKNKVPTEAEDHDGNRLMYQFGATFTQKALMKADEILTQQARQNSQKVIFHITDGVPTMSYPINFNHATFAPSYQNQLNAFFSKSPNKDGILLSDFITQATSGEHTIVRGDGQSYQMFTDKTVYEKGAPAAFPVKPEKYSEMKAAGYAVIGDPINGGYIWLNWRESILAYPFNSNTAKITNHGDPTRWYYNGNIAPDGYDVFTVGIGINGDPGTDEATATSFMQSISSKPENYTNVTDTTKILEQLNRYFHTIVTEKKSIENGTITDPMGELIDLQLGTDGRFDPADYTLTANDGSRLENGQAVGGPQNDGGLLKNAKVLYDTTEKRIRVTGLYLGTDEKVTLTYNVRLNDEFVSNKFYDTNGRTTLHPKEVEQNTVRDFPIPKIRDVRKYPEITISKEKKLGDIEFIKVNKNDKKPLRGAVFSLQKQHPDYPDIYGAIDQNGTYQNVRTGEDGKLTFKNLSDGKYRLFENSEPAGYKPVQNKPIVAFQIVNGEVRDVTSIVPQDIPAGYEFTNDKHYITNEPIPPKREYPRTGGIGMLPFYLIGCMMMGGVLLYTRKHP

SEQ ID NO: 626 - protein, 644 aa, Streptococcus pneumoniae; identical to SEQ ID NO: 174

SEQ ID NO: 627 - protein, 644 aa, Streptococcus pneumoniae; identical to SEQ ID NO: 174

SEQ ID NO: 628 - protein, 644 aa, Streptococcus pneumoniae; identical to SEQ ID NO: 174

SEQ ID NO: 629 - protein, 644 aa, Streptococcus pneumoniae; identical to SEQ ID NO: 174

SEQ ID NO: 630 - protein, 644 aa, Streptococcus pneumoniae; identical to SEQ ID NO: 189
  VARIANT (1)...(644): Xaa = Any Amino Acid

SEQ ID NO: 631 - protein, 644 aa, Streptococcus pneumoniae; identical to SEQ ID NO: 238

SEQ ID NO: 632 - protein, 654 aa, Streptococcus pneumoniae; identical to SEQ ID NO: 231

SEQ ID NO: 633 - protein, 665 aa, Streptococcus pneumoniae; identical to SEQ ID NO: 210

SEQ ID NO: 634 - protein, 612 aa, Streptococcus pneumoniae
MKSINKFLTMLAALLLTASSLFSAATVFAAGTTTTSVTVHKLLATDGDMDKIANELETGNYAGNKVGVLPANAKEIAGVMFVWTNTNNEIIDENGQTLGVNIDPQTFKLSGAMPATAMKKLTEAEGAKFNTANLPAAKYKIYEIHSLSTYVGEDGATLTGSKAVPIEIELPLNDVVDAHVYPKNTEAKPKIDKDFKGKANPDTPRVDKDTPVNHQVGDVVEYEIVTKIPALANYATANWSDRMTEGLAFNKGTVKVTVDDVALEAGDYALTEVATGFDLKLTDAGLAKVNDQNAEKTVKITYSATLNDKAIVEVPESNDVTFNYGNNPDHGNTPKPNKPNENGDLTLTKFVERSIKGYSADYQEITTAGEIAVKNWKDENPKPLDPTEPKVVTYGKKFVKVNDKDNRLAGAEFVIANADNAGQYLARKADKVSQEEKQLVVTTKDALDRAVAAYNALTAQQQTQQEKEKVDKAQAAYNAAVIAANNAFEWVADKDNENVVKLVSDAQGRFEITGLLAGTYYLEETKQPAGYALLTSRQKFEVTATSYSATGQGIEYTAGSGKDDATKVVNKKITIPQTGGIGTIIFAVAGAVIMGIAVYAYVKNNKDEDQLA

SEQ ID NO: 635 - protein, 665 aa, Streptococcus pneumoniae; identical to SEQ ID NO: 85

SEQ ID NO: 636 - protein, 401 aa, Streptococcus pneumoniae; identical to SEQ ID NO: 175

SEQ ID NO: 637 - protein, 401 aa, Streptococcus pneumoniae
MTMQKMQKMISRIFFVMALCFSLVWGAHAVQAQEDHTLVLQLENYQEVVSQLPSRDGHRLQVWKLDDSYSYDDRVQIVRDLHSWDENKLSSFKKTSFEMTFLENQIEVSHIPNGLYYVRSIIQTDAVSYPAEFLFEMTDQTVEPLVIVAKKTDTMTTKVKLIKVDQDHNRLEGVGFKLVSVARDVSEKEVPLIGEYRYSSSGQVGRTLYTDKNGEIFVTNLPLGNYRFKEVEPLAGYAVTTLDTDVQLVDHQLVTITVVNQKLPRGNVDFMKVDGRTNTSLQGAMFKVMKEESGHYTPVLQNGKEVVVTSGKDGRFRVEGLEYGTYYLWELQAPTGYVQLTSPVSFTIGKDTRKELVTVVKNNKRPRIDVPDTGEETLYILMLVAILLFGSGYYLTKKPNN

SEQ ID NO: 638 - protein, 401 aa, Streptococcus pneumoniae; identical to SEQ ID NO: 175

SEQ ID NO: 639 - protein, 401 aa, Streptococcus pneumoniae; identical to SEQ ID NO: 175

SEQ ID NO: 640 - protein, 401 aa, Streptococcus pneumoniae; identical to SEQ ID NO: 175

SEQ ID NO: 641 - protein, 401 aa, Streptococcus pneumoniae; identical to SEQ ID NO: 175

SEQ ID NO: 642 - protein, 401 aa, Streptococcus pneumoniae; identical to SEQ ID NO: 225

SEQ ID NO: 643 - protein, 401 aa, Streptococcus pneumoniae; identical to SEQ ID NO: 225

SEQ ID NO: 644 - protein, 413 aa, Streptococcus pneumoniae; identical to SEQ ID NO: 211

SEQ ID NO: 645 - protein, 401 aa, Streptococcus pneumoniae; identical to SEQ ID NO: 239

SEQ ID NO: 646 - protein, 304 aa, Streptococcus pneumoniae; identical to SEQ ID NO: 233

SEQ ID NO: 647 - protein, 304 aa, Streptococcus pneumoniae; identical to SEQ ID NO: 176

SEQ ID NO: 648 - protein, 304 aa, Streptococcus pneumoniae; identical to SEQ ID NO: 176

SEQ ID NO: 649 - protein, 304 aa, Streptococcus pneumoniae; identical to SEQ ID NO: 176

SEQ ID NO: 650 - protein, 304 aa, Streptococcus pneumoniae; identical to SEQ ID NO: 176

SEQ ID NO: 651 - protein, 304 aa, Streptococcus pneumoniae; identical to SEQ ID NO: 176

SEQ ID NO: 652 - protein, 304 aa, Streptococcus pneumoniae; identical to SEQ ID NO: 176

SEQ ID NO: 653 - protein, 302 aa, Streptococcus pneumoniae; identical to SEQ ID NO: 212

SEQ ID NO: 654 - protein, 302 aa, Streptococcus pneumoniae; identical to SEQ ID NO: 212

SEQ ID NO: 655 - protein, 302 aa, Streptococcus pneumoniae; identical to SEQ ID NO: 226

SEQ ID NO: 656 - protein, 297 aa, Streptococcus pneumoniae; identical to SEQ ID NO: 192

SEQ ID NO: 657 - protein, 297 aa, Streptococcus pneumoniae; identical to SEQ ID NO: 192

SEQ ID NO: 658 - protein, 297 aa, Streptococcus pneumoniae; identical to SEQ ID NO: 192

SEQ ID NO: 659 - protein, 297 aa, Streptococcus pneumoniae; identical to SEQ ID NO: 192

SEQ ID NO: 660 - protein, 297 aa, Streptococcus pneumoniae; identical to SEQ ID NO: 192

SEQ ID NO: 661 - protein, 297 aa, Streptococcus pneumoniae; identical to SEQ ID NO: 234

SEQ ID NO: 662 - protein, 297 aa, Streptococcus pneumoniae; identical to SEQ ID NO: 213

SEQ ID NO: 663 - protein, 297 aa, Streptococcus pneumoniae; identical to SEQ ID NO: 213

SEQ ID NO: 664 - protein, 297 aa, Streptococcus pneumoniae
MSKSRYSRKKSVKKKKNPFILLLIFLVGLAVAMYPLVSRYYYRIESNEVIKEFDETVSQMDKAELEERWRLAQAFNATLKPSEILDPFTDQEKKQGVSEYANMLKVHERIGYVEIPAIEQEIPMYVGTSEDILQKGAGLLEGASLPVGGENTHTVITAHRGLPTAELFSQLDKMKKGDIFYLHVLDQVLAYQVDQIVTVEPNDFEPVLIQHGQDYATLLTCTPYMINSHRLLVRGKRIPYTAPIAERNRAVRERGQFWLWLLLGAMAVILLLLYRVYRNRRIVKGLEKQLEGRHVKD

SEQ ID NO: 665 - protein, 297 aa, Streptococcus pneumoniae
MDNSRRSRKKGTKKKKHPLILLLIFLVGFAVAIYPLVSRYYYRIESNEVIKEFDETVSQMDKAELEERWRLAQAFNATLKPSEILDPFTEQEKKKGVSEYANMLKVHERIGYVEIPAIDQEIPMYVGTSEDILQKGAGLLEGASLPVGGENTHTVITAHRGLPTAELFSQLDKMKKGDIFYLHVLDQVLAYQVDQIVTVEPNDFEPVLIQHGEDYATLLTCTPYMINSHRLLVRGKRIPYTAPIAERNRAVRERGQFWLWLLLGAMAVILLLLYRVYRNRRIVKGLEKQLEGRHVKD

SEQ ID NO: 666 - protein, 283 aa, Streptococcus pneumoniae; identical to SEQ ID NO: 178

SEQ ID NO: 667 - protein, 283 aa, Streptococcus pneumoniae; identical to SEQ ID NO: 193

SEQ ID NO: 668 - protein, 283 aa, Streptococcus pneumoniae; identical to SEQ ID NO: 178

SEQ ID NO: 669 - protein, 283 aa, Streptococcus pneumoniae; identical to SEQ ID NO: 178

SEQ ID NO: 670 - protein, 283 aa, Streptococcus pneumoniae; identical to SEQ ID NO: 178

SEQ ID NO: 671 - protein, 283 aa, Streptococcus pneumoniae; identical to SEQ ID NO: 178

SEQ ID NO: 672 - protein, 283 aa, Streptococcus pneumoniae; identical to SEQ ID NO: 80

SEQ ID NO: 673 - protein, 283 aa, Streptococcus pneumoniae; identical to SEQ ID NO: 80

SEQ ID NO: 674 - protein, 283 aa, Streptococcus pneumoniae; identical to SEQ ID NO: 80

SEQ ID NO: 675 - protein, 283 aa, Streptococcus pneumoniae; identical to SEQ ID NO: 80

SEQ ID NO: 676 - protein, 893 aa, Streptococcus pneumoniae; identical to SEQ ID NO: 86

SEQ ID NO: 677 - DNA, 26 bp, Streptococcus pneumoniae
cgggatccgaaacgcctgaaaccagt

SEQ ID NO: 678 - DNA, 24 bp, Streptococcus pneumoniae
ccgctcgagaataggttcattggt

SEQ ID NO: 679 - protein, 665 aa, Streptococcus pneumoniae; identical to SEQ ID NO: 85

SEQ ID NO: 680 - DNA, 23 bp, Streptococcus pneumoniae
cgggatccgctgcaacagttttt

SEQ ID NO: 681 - DNA, 27 bp, Streptococcus pneumoniae
ccgctcgagagtgatttttttgttgac

SEQ ID NO: 682 - protein, 393 aa, Streptococcus pneumoniae; identical to SEQ ID NO: 84

SEQ ID NO: 683 - DNA, 29 bp, Streptococcus pneumoniae
cgggatcccatgcagtccaagcgcaagaa

SEQ ID NO: 684 - DNA, 27 bp, Streptococcus pneumoniae
ccgctcgagcttgttatttttaaccac

SEQ ID NO: 685 - DNA, 11292 bp, Streptococcus pneumoniae
gtttaggcgcttttcattataagtcttatgggacttttttgatactcaaaaagccctataatctccacagtgggatttacccactacagaaattatagagccagaaaaaacacttttgttcactagcagaaactagagagcagaagtgtttttctgttcagatttacccaaaactgggaaatatggggataagaatagagatggcttaggaagcccctttttgtgtgtagacagtacgatgaacttataacaaatagtgagcctttttagcaatcattgcgacccgtttgtcaaaagcctcttttcggatatctacaattgtctgatagatgagacgctgttggctaacatgcaaatctaaggcaatcgtcaaaaagtgatgtttccctttgggatactgctttttaacgtaaggcaggtattctttcgttgtaataataatcaatggctctgtcaaatgctcctctgaaggaggaggactaattagaatattgtatcctgtaacagaggcaactttgtcagtaaaattccgtaaaataatggactttattaagtttacatctgcttgattatttaaaatgataaaaatcgggatagcaggtagtgaggaaaagatggtttctgtcaagtagagtgagaaaaggtacagccgatgctggtcgataactccttcaatcttctgctcagtcatccactcttgaacaattgctttcgaaatatgatacagtggcttgtcgctttcaatcccataatgttcgtaataattataatagggaactagattttgtaaaccaaacaaaaacgttcttgttaagaaagtcagtgctgttaaaaaagaaagagaattcgaaatgtcatttcctaagatattcttgaacttggatagtagatgctttcctcttgtatgctgaagaatcagttgaatagtatgagtctttttttcttgattccatttgtccttggaaaacgaagaattagcagaacaataaaccaaaaagatataatccagttcttcctgagtaaaagtcatgttggcatgtggctctaagtaagtttggcaatgttccatcaaaatcggatacataaagaggttttttaatttttcaaactctttggactcagggaactcaagtggaaattcccgacgtttccaagtgagtgccactagtatgctaaaatgaacatactcgtcaggtgtgatttctaacagttcatgactgagttgagaattagactgcacaatcatatgtgtgacccaatccatacttccatcattcaaatcataaatctcaataccaaaatgaaactggaggagtgcaattaaaaaacgaatgcgatattcaggaccaactacttgatttttcacaaggtccaaacctactgaacgtagtaacaagccacacttttgtcgtacgcggtagcctgttgcgatggaaatatactctttttgtgtaaattcgttaaagctttgattaccttgtagtagaaagaagcggagtatttttaaaatagttgattggttataaagctgatggaagtaataattcgtttgatgagaatggtgttcgattaattgaacttgttgcgtatctaaattaaatgtcaactcttcctcgaatgtttcttgtaattcctgcaaaatgcttaggagacttttagattgtaatgaagttaaagtagacagttcatctagttcaatagaccgaatatccaataatatatttaaaatggtaattttatctgtaattcttttttcaatgtatttgtttagcatagttaccgaatcttagttgcatatagataattttaattattataatacaaaagaaactaattgtcttgtcaaaaaggttgtggaatttccgactttattgataaaacagcatgtaataaaaggcattttaaagatagtaatgagtattggtggagttttatggcttattttttttattagaaaatatttttttatcaaatattgtcgttctataaaaaaatatgtgataaaaatatctattgtgatggaagttgttttaatttatactaggatagttaatagtaatactatactatactatattgtatacaagtgtgtcattgccaggttgagaagatagctataacgcacttttatacgcttttgctacgtttgttagtgaacggattaactcagtgagataaattttatcagaacataagtaatccgtttcttcgtgtatacagattgaaagtacctatgaatcatagaaggattaacttgttctatgaataatgcttaacagggagacacacatgaaaaaagtaagaaagatatttcagaaggcagttgcaggactgtgctgtatatctcagttgacagctttttcttcgatagttgctttagcagaaacgcctgaaaccagtccagcgataggaaaagtagtgattaaggagacaggcgaaggaggagcgcttctaggagatgccgtctttgagttgaaaaacaatacggatggcacaactgtttcgcaaaggacagaggcgcaaacaggagaagcgatattttcaaacataaaacctgggacatacaccttgacagaagcccaacctccagttggttataaaccctctactaaacaatggactgttgaagttgagaagaatggtcggacgactgtccaaggtgaacaggtagaaaatcgagaagaggctctatctgaccagtatccacaaacagggacttatccagatgttcaaacaccttatcagattattaaggtagatggttcggaaaaaaacggacagcacaaggcgttgaatccgaatccatatgaacgtgtgattccagaaggtacactttcaaagagaatttatcaagtgaataatttggatgataaccaatatggaatcgagttgacggttagtggtaaaacgacggttgaaacgaaagaagcctctactccgctagatgttgttattctattagataactccaatagtatgagtaatattcgacataatcatgcccatcgagcggaaaaagcgggagaagcgacacgagcccttgtagataagattacctccaatccagataatcgagtagcacttgtgacttatggctcaactatctttgacggttcagaagctactgtggaaaaaggggtagcagatgcgaacggaaaaatattgaatgactcagctttatggacgttcgatcgtacgacgtttacagctaaaacttataattatagctttttaaatctcacatcagatcctactgatattcaaactattaaggataggattccatcagatgcagaggaattgaacaaagacaaattgatgtatcaattcggcgcgacttttacccagaaggctttgatgaccgctgatgatatcttgacaaagcaggcaagaccaaacagtaaaaaggttattttccacattacagatggtgttccgactatgtcatatccaattaattttaaatatacaggaacgacgcaatcgtacagaactcagctgaataattttaaagcaaaaactccaaatagtagcgggatattactggaggactttgttacatggtcagcagatggtgaacataagattgttcgtggagatggtgaaagttatcagatgtttacgaagaaacctgtaacagaccaatacggagttcatcaaatactttcaatcacctccatggagcagagagctaaattagtttcagcgggatataggttctatggaactgacttgtatttatattggcgtgatagtattctagcctatccatttaactctagtaccgattggattaccaaccatggtgaccctacgacttggtattataacggaaatatggctcaggatggctatgatgtcttcactgttggggttggtgtaaacggggatcctggtacggatgaagcaacggctactagatttatgcagagcatctctagttctcctgacaactacactaacgtagcagatccatctcagattttacaagaattgaatcgctacttctatactatcgtcaatgagaagaaatctatcgaaaatggtacgattacagacccgatgggtgaactaattgatttccaattgggagcagatggaaggtttgatccagcggattacactttaactgcaaacgatggtagttcgttggtgaataatgtccctactgggggaccacaaaatgatggtggcttgctaaaaaatgcaaaagtgttctatgatacgactgagaaaaggattcgtgtaacaggtttgtaccttggaacgggtgaaaaagttacattgacttataatgttcgcttgaatgaccaatttgtaagcaataaattctatgacacgaatggtcgaacaaccctacaccctaaggaagtagaaaagaacacagtgcgcgacttcccgattcctaagattcgtgatgtacgaaagtatccagaaatcacaattccaaaagagaaaaaacttggtgaaattgagtttattaagatcaataagaatgataaaaaaccactgagagatgcggtctttagtcttcaaaaacaacatccggattatccagatatttatggagctattgatcaaaatggcacttatcaaaatgtgagaacaggtgaagatggtaagttgacctttaaaaatctgtcagatgggaaatatcgattatttgaaaattctgaaccagctggttataaacccgttcaaaataagcctatcgttgccttccaaatagtaaatggagaagtcagagatgtgacttcaatcgttccacaagatataccagcgggttacgagtttacgaatgataagcactatatcacaaatgagccaattcctccaaaaagagaatatcctcgaactggtggtatcggaatgttgccattctatctgataggttgcatgatgatgggaggagttctattatacacacggaaacatccgtaaagtgtagcaatgagaaatgataatatcgatactctgagcgatacttttaagaagtagcactcaagaagagatttaagtttacttggtgaaaacagttttcttcgccaagtaaaccaccattgaaaggggagatgttttcgaaaacttgcacagaaaaaaggattattattgtcatgtgtaattcattacattgctcacagttgattttaagagatatgaataaggagaaatcatgaaatcaatcaacaaatttttaacaatgcttgctgccttattactgacagcgagtagcctgttttcagctgcaacagtttttgcggcggacaatgttagtacagcaccagatgctgttactaaaactttaacaatccataagttactgctctcagaagatgatttaaagacttgggatacaaacggtcctaaaggatatgatggaactcaatctagtttaaaagatttaactggagttgtagctgaggaaattccaaatgtatactttgaattacaaaagtataatttgactgatggtaaggaaaaagaaaatcttaaagatgatagtaaatggacaacagttcatggtggtttgacaactaaagatggacttaaaattgaaaccagtactcttaaaggtgtgtatcgtattcgtgaggatagaacaaagactacctatgttggtcctaatgggcaagtattaacaggttcaaaagccgtacctgctcttgtaactcttccacttgttaacaataatggtacagtaattgatgcacatgttttccctaaaaattcatataataaaccagttgtagataaaagaattgctgatactttgaattataacgatcaaaatggtctgtctatcggtactaaaatcccatatgttgttaatacaacaattccaagtaatgcaacatttgcaacttcattttggtcagatgaaatgacagaaggtctaacttataatgaagagtaacaattactttgaataatgtagctatggatcaagctgattatgaagtcactaaaggaaataatggctttaacttaaaattaacagaagcaggtttagctaaaattaatggtaaggatgcagaccaaaaaatccaaattacttactcagctactttgaactcacttgctgttgcagacattcctgaaagtaacgatattacatatcattacggaaatcatcaagatcatgggaatactccaaaaccaactaaacctaataatggtcaaattacagtaactaagacatgggacagtcaacctgctcctgagggggtgaaagcgactgttcaacttgtaaatgccaagactggtgagaaagtcggtgctcctgtagaactttcagaaaataattggacatatacttggagtggtctagataattctattgaatacaaagttgaagaagaatataatggatactcagctgaatacacagtagagagcaaagggaagttgggggtaaaaaactggaaagataataacccagctccaatcaatctgaagaaccacgtgtaaaaacatacggtaaaaagtttgtcaaagtagaccaaaaagatactcgtctagaaaatgcgcagttcgttgttaaaaaagcagatagcaataaatatattgcctttaagtcaactgcacaacaagctgcagatgaaaaagcagcagcaactgcaaaacaaaaattggatgcagcggtagcagcttacacaaatgctgcagataagcaagccgctcaagctctagtagatcaagcacagcaagaatacaatgtagcttacaaagaagccaaatttggttatgttgaagtagctggaaaagatgaagcaatggttcttacttctaatacggatggtcaattccaaatttcaggtcttgctgctggtacttataaattagaagaaattaaagctccagaaggttttgcgaaaattgatgatgtagaatttgttgttggagcaggttcttggaatcaaggtgagtttaattacttaaaagatgttcaaaagaatgacgctacaaaagtagtcaacaaaaaaatcactatcccacaaacgggtggtattggtacaattatctttgctgtagcgggggctgcgattatgggtattgcagtgtacgcatatgttaaaaacaacaaagatgaggatcaacttgcttaagtaagagagaaaggagccattgatgacaatgcagaaaatgcagaaaatgattagtcgtatcttctttgttatggctctgtgtttttctcttgtatggggtgcacatgcagtccaagcgcaagaagatcacacgttggtcttgcaattggagaactatcaggaggtggttagtcaattgccatctcgtgatggtcatcggttgcaagtatggaagttggatgattcgtattcctatgatgatcgggtgcaaattgtaagagacttgcattcgtgggatgagaataaactttcttctttcaaaaagacttcgtttgagatgaccttccttgagaatcagattgaagtatctcatattccaaatggtctttactatgttcgctctattatccagacggatgcggtttcttatccagctgaatttctttttgaaatgacagatcaaacggtagagcctttggtcattgtagcgaaaaaaacagatacaatgacaacaaaggtgaagctgataaaggtggatcaagaccacaaggttcccttgattggagaataccgttacagttcttctggtcaagtagggagaactctctatactgataaaaatggagagatttttgtgacaaatcttcctcttgggaactatcgtttcaaggaggtggagccactggcaggctatgctgttacgacgctggatacggatgtccagctggtagatcatcagctggtgacgattacggttgtcaatcagaaattaccacgtggcaatgttgactttatgaaggtggatggtcggaccaatacctctcttcaaggggcaatgttcaaagtcatgaaagaagaaagcggacactatactcctgttcttcaaaatggtaaggaagtagttgtaacatcagggaaagatggtcgtttccgagtggaaggtctagagtatgggacatactatttatgggagctccaagctccaactggttatgttcaattaacatcgcctgtttcctttacaatcgggaaagatactcgtaaggaactggtaacagtggttaaaaataacaagcgaccacggattgatgtgccagatacaggggaagaaaccttgtatatcttgatgcttgttgccattttgttgtttggtagtggttattatcttacgaaaaaaccaaataactgatattcaatgtacatcattatgaaaaagatagcaggctgaagggaagaccagagtactctgaggtgatgttaatcaggaatcatggtgatgtggcatgaatcacaataacggatatgaggctgggcagattgtgccagcctcattgtgggttattgtttgtaaaacgataggactggtctggtaatcattttaggaatggacaggactgggattctgatttaaaatggatggtgaatcagaaagaaatgagattttctcgtttctcttagcagataggattgtctgttaggaaaagcgataaaatgatgagtttgaagataaagggatgctgataaaaatggtaaaaacaaaaaagcaaaaacgaaataatctcctattaggagtggtatttttcattggaatggcggtaatggcgtatccgctggtgtctcgcttgtattatcgagtggaatcaaatcaacaaattgctgactttgataaggaaaaagcaacgttggatgaggctgacattgatgaacgaatgaaattggcacaagccttcaatgactctttgaataatgtagtgagtggcgatccttggtcggaagaaatgaagaaaaaagggcgagcagagtatgcacgtatgttagaaatccatgagcggatggggcatgtggaaatccccgttattgacgtggatttgccggtttatgctggtactgctgaagaggtattgcagcaaggggctgggcatctagagggaacttctctgccgatcggaggcaattcgacccatgcggtgattacggcacatacaggtttgccaacagctaagatgtttacggatttgaccaaacttaaagttggggataagttttatgtgcacaatatcaaggaagtgatggcctatcaagtggatcaagtaaaggtgattgagccgacgaactttgatgatttattgattgtaccaggtcatgattatgtgaccttgctgacttgtacgccatacatgatcaatacccatcgtctattggttcgggggcatcggataccgtacgtagcagaggttgaggaagaatttattgcagcaaacaaactcagtcatctctatcgctacctgttttatgtggcagttggtttgattgtgattcttttatggattattcgacgcttgcgcaagaagaaaaaacaaccggaaaaggctttgaaggcgctgaaagcagcaaggaaggaagtgaaggtggaggatggacaacagtagacgttcacgaaaaaaaggcacaaaaaagaagaaacatccgctgatccttcttctgattttcttagtaggattcgccgttgcgatatatccattggtgtctcgttattattatcgtattgagtcaaacgaggttattaaagagtttgatgagacggtttcccagatggataaggcagaacttgaggagcgttggcgcttggctcaagccttcaatgcgaccttgaaaccatctgaaattcttgatccttttacagagcaagagaaaaagaaaggcgtctcagaatatgccaatatgctaaaggtccatgagcggattggctatgtggaaattcctgcgattgatcaggaaattccgatgtatgtcggaacgagtgaggaaattcttcagaagggcgcaggattgctagagggagcttcgttaccggttggtggtgaaaatacccacacagttgtcactgctcatagaggattaccgacggcagaactgtttagtcaattggataagatgaaaaaaggggatgtcttttatcttcacgttttagaccaggtgttggcctaccaagtggatcagattttgacggttgagccaaatgactttgagcctgtcttgattcaacatggggaagattatgcgaccttgttgacctgtacaccgtatatgattaacagtcatcgtctgttggtacgtgggaagcggattccgtatacggcaccaattgcagagcgaaatcgagcggtgagagagcgtgggcaattctggttgtggttattgctagcggcgttggttatgattctggtattgagttacggggtgtatcgtcatcgtcgcattgtcaaagggctagaaaaacaattggaggagcatcatgtcaaaggctaagctacagaaattactagggtatttgctgatgctggtagcattggtgattcctgtttattgttttgggcagatggtgttacagtctttaggacaagtaaaaggtcatgagatattttcagaatctgtgacggccgacagttaccaagagcaattgcaacggtcgcttgattacaatcaacgcttggattcgcaaaatcgtattgtagatccttttttggcggaagggtatgaggtaaattaccaagtgtctgacgatcctgatgcagtctacggctatttgtcgattccgagtttggaaatcatggagccagtttatctaggagcggattaccatcatttagcaatggggttggcccatgtggatgggacgcctcttcctgttgagggaaaagggattcgttcagtgattgctgggcaccgtgcagaaccaagccatgtctttttccgccatttggatcagctaaaagttggagatgctctttattatgataatggccaggaaattgtagaatatcagatgatggacacagagattattttaccgtcggaatgggaaaaattagaatcggttagctctaaaaatatcatgaccttgataacctgcgatccgattcctacctttaataaacgcttattagtgaattttgaacgagtcgctgtttatcaaaaatcagatccacaaacagctgcagttgcgagggttgcttttacgaaagaaggacaatctgtatcgcgtgttgcaacctctcaatggttgtaccgtgggctagtggtactggcatttctgggaatcctgtttgttttgtggaagctagcacgtttactacgagggaaataaaaagaaatgaaaggaaagctaaggctgttcctttttccggctctttgtcaactgtagggg

SEQ ID NO: 686 - DNA, 11360 bp, Streptococcus pneumoniae
tgagttgtttaggcgcttttcattataagtcttatgggacttttttgatactcaaaaagccctataatctccacagtgggatttacccactacagaaattatagagccagaaaaaacacttttgttcactagcagaaactagagagcagaagtgtttttctgttcagatttacccaaaactgggaaatatggggataagaatagagatggcttaggaagcccctttttgtgtgtagacagtacgatgaacttataacaaatagtgagcctttttagcaatcattgcgacccgtttgtcaaaagcctcttttcggatatctacaattgtctgatagatgagacgctgttggctaacatgcaaatctaaggcaatcgtcaaaaagtgatgtttccctttgggatactgctttttaacgtaaggcaggtattctttcgttgtaataataatcaatggctctgtcaaatgctcctctgaaggaggaggactaattagaatattgtatcctgtaacagaggcaactttgtcagtaaaattccgtaaaataatggactttattaagtttacatctgcttgattatttaaaatgataaaaatcgggatagcaggtagtgaggaaaagatggtttctgtcaagtagagtgagaaaaggtacagccgatgctggtcgataactccttcaatcttctgctcagtcatccactcttgaacaattgctttcgaaatatgatacagtggcttgtcgctttcaatcccataatgttcgtaataattataatagggaactagattttgtaaaccaaacaaaaacgttcttgttaagaaagtcagtgctgttaaaaaagaaagagaattcgaaatgtcatttcctaagatattcttgaacttggatagtagatgctttcctcttgtatgctgaagaatcagttgaatagtatgagtctttttttcttgattccatttgtccttggaaaacgaagaattagcagaacaataaaccaaaaagatataatccagttcttcctgagtaaaagtcatgttggcatgtggctctaagtaagtttggcaatgttccatcaaaatcggatacataaagaggttttttaatttttcaaactctttggactcagggaactcaagtggaaattcccgacgtttccaagtgagtgccactagtatgctaaaatgaacatactcgtcaggtgtgatttctaacagttcatgactgagttgagaattagactgcacaatcatatgtgtgacccaatccatacttccatcattcaaatcataaatctcaataccaaaatgaaactggaggagtgcaattaaaaaacgaatgcgatattcaggaccaactacttgatttttcacaaggtccaaacctactgaacgtagtaacaagccacacttttgtcgtacgcggtagcctgttgcgatggaaatatactctttttgtgtaaattcgttaaagctttgattaccttgtagtagaaagaagcggagtatttttaaaatagttgattggttataaagctgatggaagtaataattcgtttgatgagaatggtgttcgattaattgaacttgttgcgtatctaaattaaatgtcaactcttcctcgaatgtttcttgtaattcctgcaaaatgcttaggagacttttagattgtaatgaagttaaagtagacagttcatctagttcaatagaccgaatatccaataatatatttaaaatggtaattttatctgtaattcttttttcaatgtatttgtttagcatagttaccgaatcttagttgcatatagataattttaattattataatacaaaagaaactaattgtcttgtcaaaaaggttgtggaatttccgactttattgataaaacagcatgtaataaaaggcattttaaagatagtaatgagtattggtggagttttatggcttattttttttattagaaaatatttttttatcaaatattgtcgttctataaaaaaatatgtgataaaaatatctattgtgatggaagttgttttaatttatactaggatagttaatagtaatactatactatactatattgtatacaagtgtgtcattgccaggttgagaagatagctataacgcacttttatacgcttttgctacgtttgttagtgaacggattaactcagtgagataaattttatcagaacataagtaatccgtttcttcgtgtatacagattgaaagtacctatgaatcatagaaggattaacttgttctatgaataatgcttaacagggagacacacatgaaaaaagtaagaaagatatttcagaaggcagttgcaggactgtgctgtatatctcagttgacagctttttcttcgatagttgctttagcagaaacgcctgaaaccagtccagcgataggaaaagtagtgattaaggagacaggcgaaggaggagcgcttctaggagatgccgtctttgagttgaaaaacaatacggatggcacaactgtttcgcaaaggacagaggcgcaaacaggagaagcgatattttcaaacataaaacctgggacatacaccttgacagaagcccaacctccagttggttataaaccctctactaaacaatggactgttgaagttgagaagaatggtcggacgactgtccaaggtgaacaggtagaaaatcgagaagaggctctatctgaccagtatccacaaacagggacttatccagatgttcaaacaccttatcagattattaaggtagatggttcggaaaaaaacggacagcacaaggcgttgaatccgaatccatatgaacgtgtgattccagaaggtacactttcaaagagaatttatcaagtgaataatttggatgataaccaatatggaatcgagttgacggttagtggtaaaacgacggttgaaacgaaagaagcctctactccgctagatgttgttattctattagataactccaatagtatgagtaatattcgacataatcatgcccatcgagcggaaaaagcgggagaagcgacacgagcccttgtagataagattacctccaatccagataatcgagtagcacttgtgacttatggctcaactatctttgacggttcagaagctactgtggaaaaaggggtagcagatgcgaacggaaaaatattgaatgactcagctttatggacgttcgatcgtacgacgtttacagctaaaacttataattatagctttttaaatctcacatcagatcctactgatattcaaactattaaggataggattccatcagatgcagaggaattgaacaaagacaaattgatgtatcaattcggcgcgacttttacccagaaggctttgatgaccgctgatgatatcttgacaaagcaggcaagaccaaacagtaaaaaggttattttccacattacagatggtgttccgactatgtcatatccaattaattttaaatatacaggaacgacgcaatcgtacagaactcagctgaataattttaaagcaaaaactccaaatagtagcgggatattactggaggactttgttacatggtcagcagatggtgaacataagattgttcgtggagatggtgaaagttatcagatgtttacgaagaaacctgtaacagaccaatacggagttcatcaaatactttcaatcacctccatggagcagagagctaaattagtttcagcgggatataggttctatggaactgacttgtatttatattggcgtgatagtattctagcctatccatttaactctagtaccgattggattaccaaccatggtgaccctacgacttggtattataacggaaatatggctcaggatggctatgatgtcttcactgttggggttggtgtaaacggggatcctggtacggatgaagcaacggctactagatttatgcagagcatctctagttctcctgacaactacactaacgtagcagatccatctcagattttacaagaattgaatcgctacttctatactatcgtcaatgagaagaaatctatcgaaaatggtacgattacagacccgatgggtgaactaattgatttccaattgggagcagatggaaggtttgatccagcggattacactttaactgcaaacgatggtagttcgttggtgaataatgtccctactgggggaccacaaaatgatggtggcttgctaaaaaatgcaaaagtgttctatgatacgactgagaaaaggattcgtgtaacaggtttgtaccttggaacgggtgaaaaagttacattgacttataatgttcgcttgaatgaccaatttgtaagcaataaattctatgacacgaatggtcgaacaaccctacaccctaaggaagtagaaaagaacacagtgcgcgacttcccgattcctaagattcgtgatgtacgaaagtatccagaaatcacaattccaaaagagaaaaaacttggtgaaattgagtttattaagatcaataagaatgataaaaaaccactgagagatgcggtctttagtcttcaaaaacaacatccggattatccagatatttatggagctattgatcaaaatggcacttatcaaaatgtgagaacaggtgaagatggtaagttgacctttaaaaatctgtcagatgggaaatatcgattatttgaaaattctgaaccagctggttataaacccgttcaaaataagcctatcgttgccttccaaatagtaaatggagaagtcagagatgtgacttcaatcgttccacaagatataccagcgggttacgagtttacgaatgataagcactatatcacaaatgagccaattcctccaaaaagagaatatcctcgaactggtggtatcggaatgttgccattctatctgataggttgcatgatgatgggaggagttctattatacacacggaaacatccgtaaagtgtagcaatgagaaatgataatatcgatactctgagcgatacttttaagaagtagcactcaagaagagatttaagtttacttggtgaaaacagttttcttcgccaagtaaaccaccattgaaaggggagatgttttcgaaaacttgcacagaaaaaaggattattattgtcatgtgtaattcattacattgctcacagttgattttaagagatatgaataaggagaaatcatgaaatcaatcaacaaatttttaacaatgcttgctgccttattactgacagcgagtagcctgttttcagctgcaacagtttttgcggcggacaatgttagtacagcaccagatgctgttactaaaactttaacaatccataagttactgctctcagaagatgatttaaagacttgggatacaaacggtcctaaaggatatgatggaactcaatctagtttaaaagatttaactggagttgtagctgaggaaattccaaatgtatactttgaattacaaaagtataatttgactgatggtaaggaaaaagaaaatcttaaagatgatagtaaatggacaacagttcatggtggtttgacaactaaagatggacttaaaattgaaaccagtactcttaaaggtgtgtatcgtattcgtgaggatagaacaaagactacctatgttggtcctaatgggcaagtattaacaggttcaaaagccgtacctgctcttgtaactcttccacttgttaacaataatggtacagtaattgatgcacatgttttccctaaaaattcatataataaaccagttgtagataaaagaattgctgatactttgaattataacgatcaaaatggtctgtctatcggtactaaaatcccatatgttgttaatacaacaattccaagtaatgcaacatttgcaacttcattttggtcagatgaaatgacagaaggtctaacttataatgaagatgtaacaattactttgaataatgtagctatggatcaagctgattatgaagtcactaaaggaaataatggctttaacttaaaattaacagaagcaggtttagctaaaattaatggtaaggatgcagaccaaaaaatccaaattacttactcagctactttgaactcacttgctgttgcagacattcctgaaagtaacgatattacatatcattacggaaatcatcaagatcatgggaatactccaaaaccaactaaacctaataatggtcaaattacagtaactaagacatgggacagtcaacctgctcctgagggggtgaaagcgactgttcaacttgtaaatgccaagactggtgagaaagtcggtgctcctgtagaactttcagaaaataattggacatatacttggagtggtctagataattctattgaatacaaagttgaagaagaatataatggatactcagctgaatacacagtagagagcaaagggaagttgggggtaaaaaactggaaagataataacccagctccaatcaatcctgaagaaccacgtgtaaaaacatacggtaaaaagtttgtcaaagtagaccaaaaagatactcgtctagaaaatgcgcagttcgttgttaaaaaagcagatagcaataaatatattgcctttaagtcaactgcacaacaagctgcagatgaaaaagcagcagcaactgcaaaacaaaaattggatgcagcggtagcagcttacacaaatgctgcagataagcaagccgctcaagctctagtagatcaagcacagcaagaatacaatgtagcttacaaagaagccaaatttggttatgttgaagtagctggaaaagatgaagcaatggttcttacttctaatacggatggtcaattccaaatttcaggtcttgctgctggtacttataaattagaagaaattaaagctccagaaggttttgcgaaaattgatgatgtagaatttgttgttggagcaggttcttggaatcaaggtgagtttaattacttaaaagatgttcaaaagaatgacgctacaaaagtagtcaacaaaaaaatcactatcccacaaacgggtggtattggtacaattatctttgctgtagcgggggctgcgattatgggtattgcagtgtacgcatatgttaaaaacaacaaagatgaggatcaacttgcttaagtaagagagaaaggagccattgatgacaatgcagaaaatgcagaaaatgattagtcgtatcttctttgttatggctctgtgtttttctcttgtatggggtgcacatgcagtccaagcgcaagaagatcacacgttggtcttgcaattggagaactatcaggaggtggttagtcaattgccatctcgtgatggtcatcggttgcaagtatggaagttggatgattcgtattcctatgatgatcgggtgcaaattgtaagagacttgcattcgtgggatgagaataaactttcttctttcaaaaagacttcgtttgagatgaccttccttgagaatcagattgaagtatctcatattccaaatggtctttactatgttcgctctattatccagacggatgcggtttcttatccagctgaatttctttttgaaatgacagatcaaacggtagagcctttggtcattgtagcgaaaaaaacagatacaatgacaacaaaggtgaagctgataaaggtggatcaagaccacaatcgcttggagggtgtcggctttaaattggtatcagtagcaagagatggttctgaaaaagaggttcccttgattggagaataccgttacagttcttctggtcaagtagggagaactctctatactgataaaaatggagagatttttgtgacaaatcttcctcttgggaactatcgtttcaaggaggtggagccactggcaggctatgctgttacgacgctggatacggatgtccagctggtagatcatcagctggtgacgattacggttgtcaatcagaaattaccacgtggcaatgttgactttatgaaggtggatggtcggaccaatacctctcttcaaggggcaatgttcaaagtcatgaaagaagaaagcggacactatactcctgttcttcaaaatggtaaggaagtagttgtaacatcagggaaagatggtcgtttccgagtggaaggtctagagtatgggacatactatttatgggagctccaagctccaactggttatgttcaattaacatcgcctgtttcctttacaatcgggaaagatactcgtaaggaactggtaacagtggttaaaaataacaagcgaccacggattgatgtgccagatacaggggaagaaaccttgtatatcttgatgcttgttgccattttgttgtttggtagtggttattatcttacgaaaaaaccaaataactgatattcaatgtacatcattatgaaaaagatagcaggctgaagggaagaccagagtactctgaggtgatgttaatcaggaatcatggtgatgtggcatgaatcacaataacggatatgaggctgggcagattgtgccagcctcattgtgggttattgtttgtaaaacgataggactggtctggtaatcattttaggaatggacaggactgggattctgatttaaaatggatggtgaatcagaaagaaatgagattttctcgtttctcttagcagataggattgtctgttaggaaaagcgataaaatgatgagtttgaagataaagggatgctgataaaaatggtaaaaacaaaaaagcaaaaacgaaataatctcctattaggagtggtatttttcattggaatggcggtaatggcgtatccgctggtgtctcgcttgtattatcgagtggaatcaaatcaacaaattgctgactttgataaggaaaaagcaacgttggatgaggctgacattgatgaacgaatgaaattggcacaagccttcaatgactctttgaataatgtagtgagtggcgatccttggtcggaagaaatgaagaaaaaagggcgagcagagtatgcacgtatgttagaaatccatgagcggatggggcatgtggaaatccccgttattgacgtggatttgccggtttatgctggtactgctgaagaggtattgcagcaaggggctgggcatctagagggaacttctctgccgatcggaggcaattcgacccatgcggtgattacggcacatacaggtttgccaacagctaagatgtttacggatttgaccaaacttaaagttggggataagttttatgtgcacaatatcaaggaagtgatggcctatcaagtggatcaagtaaaggtgattgagccgacgaactttgatgatttattgattgtaccaggtcatgattatgtgaccttgctgacttgtacgccatacatgatcaatacccatcgtctattggttcgggggcatcggataccgtacgtagcagaggttgaggaagaatttattgcagcaaacaaactcagtcatctctatcgctacctgttttatgtggcagttggtttgattgtgattcttttatggattattcgacgcttgcgcaagaagaaaaaacaaccggaaaaggctttgaaggcgctgaaagcagcaaggaaggaagtgaaggtggaggatggacaacagtagacgttcacgaaaaaaaggcacaaaaaagaagaaacatccgctgatccttcttctgattttcttagtaggattcgccgttgcgatatatccattggtgtctcgttattattatcgtattgagtcaaacgaggttattaaagagtttgatgagacggtttcccagatggataaggcagaacttgaggagcgttggcgcttggctcaagccttcaatgcgaccttgaaaccatctgaaattcttgatccttttacagagcaagagaaaaagaaaggcgtctcagaatatgccaatatgctaaaggtccatgagcggattggctatgtggaaattcctgcgattgatcaggaaattccgatgtatgtcggaacgagtgaggaaattcttcagaagggcgcaggattgctagagggagcttcgttaccggttggtggtgaaaatacccacacagttgtcactgctcatagaggattaccgacggcagaactgtttagtcaattggataagatgaaaaaaggggatgtcttttatcttcacgttttagaccaggtgttggcctaccaagtggatcagattttgacggttgagccaaatgactttgagcctgtcttgattcaacatggggaagattatgcgaccttgttgacctgtacaccgtatatgattaacagtcatcgtctgttggtacgtgggaagcggattccgtatacggcaccaattgcagagcgaaatcgagcggtgagagagcgtgggcaattctggttgtggttattgctagcggcgttggttatgattctggtattgagttacggggtgtatcgtcatcgtcgcattgtcaaagggctagaaaaacaattggaggagcatcatgtcaaaggctaagctacagaaattactagggtatttgctgatgctggtagcattggtgattcctgtttattgttttgggcagatggtgttacagtctttaggacaagtaaaaggtcatgagatattttcagaatctgtgacggccgacagttaccaagagcaattgcaacggtcgcttgattacaatcaacgcttggattcgcaaaatcgtattgtagatccttttttggcggaagggtatgaggtaaattaccaagtgtctgacgatcctgatgcagtctacggctatttgtcgattccgagtttggaaatcatggagccagtttatctaggagcggattaccatcatttagcaatggggttggcccatgtggatgggacgcctcttcctgttgagggaaaagggattcgttcagtgattgctgggcaccgtgcagaaccaagccatgtctttttccgccatttggatcagctaaaagttggagatgctctttattatgataatggccaggaaattgtagaatatcagatgatggacacagagattattttaccgtcggaatgggaaaaattagaatcggttagctctaaaaatatcatgaccttgataacctgcgatccgattcctacctttaataaacgcttattagtgaattttgaacgagtcgctgtttatcaaaaatcagatccacaaacagctgcagttgcgagggttgcttttacgaaagaaggacaatctgtatcgcgtgttgcaacctctcaatggttgtaccgtgggctagtggtactggcatttctgggaatcctgtttgttttgtggaagctagcacgtttactacgagggaaataaaaagaaatgaaaggaaagctaaggctgttcctttttccggctctttgtcaactgtagtgg

SEQ ID NO: 687 - DNA, 11351 bp, Streptococcus pneumoniae
gtttaggcgcttttcattataagtcttatgggacttttttgatactcaaaaagccctataatctccacagtgggatttacccactacagaaattatagagccagaaaaaacacttttgttcactagcagaaactagagagcagaagtgtttttctgttcagatttacccaaaactgggaaatatggggataagaatagagatggcttaggaagcccctttttgtgtgtagacagtacgatgaacttataacaaatagtgagcctttttagcaatcattgcgacccgtttgtcaaaagcctcttttcggatatctacaattgtctgatagatgagacgctgttggctaacatgcaaatctaaggcaatcgtcaaaaagtgatgtttccctttgggatactgctttttaacgtaaggcaggtattctttcgttgtaataataatcaatggctctgtcaaatgctcctctgaaggaggaggactaattagaatattgtatcctgtaacagaggcaactttgtcagtaaaattccgtaaaataatggactttattaagtttacatctgcttgattatttaaaatgataaaaatcgggatagcaggtagtgaggaaaagatggtttctgtcaagtagagtgagaaaaggtacagccgatgctggtcgataactccttcaatcttctgctcagtcatccactcttgaacaattgctttcgaaatatgatacagtggcttgtcgctttcaatcccataatgttcgtaataattataatagggaactagattttgtaaaccaaacaaaaacgttcttgttaagaaagtcagtgctgttaaaaaagaaagagaattcgaaatgtcatttcctaagatattcttgaacttggatagtagatgctttcctcttgtatgctgaagaatcagttgaatagtatgagtctttttttcttgattccatttgtccttggaaaacgaagaattagcagaacaataaaccaaaaagatataatccagttcttcctgagtaaaagtcatgttggcatgtggctctaagtaagtttggcaatgttccatcaaaatcggatacataaagaggttttttaatttttcaaactctttggactcagggaactcaagtggaaattcccgacgtttccaagtgagtgccactagtatgctaaaatgaacatactcgtcaggtgtgatttctaacagttcatgactgagttgagaattagactgcacaatcatatgtgtgacccaatccatacttccatcattcaaatcataaatctcaataccaaaatgaaactggaggagtgcaattaaaaaacgaatgcgatattcaggaccaactacttgatttttcacaaggtccaaacctactgaacgtagtaacaagccacacttttgtcgtacgcggtagcctgttgcgatggaaatatactctttttgtgtaaattcgttaaagctttgattaccttgtagtagaaagaagcggagtatttttaaaatagttgattggttataaagctgatggaagtaataattcgtttgatgagaatggtgttcgattaattgaacttgttgcgtatctaaattaaatgtcaactcttcctcgaatgtttcttgtaattcctgcaaaatgcttaggagacttttagattgtaatgaagttaaagtagacagttcatctagttcaatagaccgaatatccaataatatatttaaaatggtaattttatctgtaattcttttttcaatgtatttgtttagcatagttaccgaatcttagttgcatatagataattttaattattataatacaaaagaaactaattgtcttgtcaaaaaggttgtggaatttccgactttattgataaaacagcatgtaataaaaggcattttaaagatagtaatgagtattggtggagttttatggcttattttttttattagaaaatatttttttatcaaatattgtcgttctataaaaaaatatgtgataaaaatatctattgtgatggaagttgttttaatttatactaggatagttaatagtaatactatactatactatattgtatacaagtgtgtcattgccaggttgagaagatagctataacgcacttttatacgcttttgctacgtttgttagtgaacggattaactcagtgagataaattttatcagaacataagtaatccgtttcttcgtgtatacagattgaaagtacctatgaatcatagaaggattaacttgttctatgaataatgcttaacagggagacacacatgaaaaaagtaagaaagatatttcagaaggcagttgcaggactgtgctgtatatctcagttgacagctttttcttcgatagttgctttagcagaaacgcctgaaaccagtccagcgataggaaaagtagtgattaaggagacaggcgaaggaggagcgcttctaggagatgccgtctttgagttgaaaaacaatacggatggcacaactgtttcgcaaaggacagaggcgcaaacaggagaagcgatattttcaaacataaaacctgggacatacaccttgacagaagcccaacctccagttggttataaaccctctactaaacaatggactgttgaagttgagaagaatggtcggacgactgtccaaggtgaacaggtagaaaatcgagaagaggctctatctgaccagtatccacaaacagggacttatccagatgttcaaacaccttatcagattattaaggtagatggttcggaaaaaaacggacagcacaaggcgttgaatccgaatccatatgaacgtgtgattccagaaggtacactttcaaagagaatttatcaagtgaataatttggatgataaccaatatggaatcgagttgacggttagtggtaaaacgacggttgaaacgaaagaagcctctactccgctagatgttgttattctattagataactccaatagtatgagtaatattcgacataatcatgcccatcgagcggaaaaagcgggagaagcgacacgagcccttgtagataagattacctccaatccagataatcgagtagcacttgtgacttatggctcaactatctttgacggttcagaagctactgtggaaaaaggggtagcagatgcgaacggaaaaatattgaatgactcagctttatggacgttcgatcgtacgacgtttacagctaaaacttataattatagctttttaaatctcacatcagatcctactgatattcaaactattaaggataggattccatcagatgcagaggaattgaacaaagacaaattgatgtatcaattcggcgcgacttttacccagaaggctttgatgaccgctgatgatatcttgacaaagcaggcaagaccaaacagtaaaaaggttattttccacattacagatggtgttccgactatgtcatatccaattaattttaaatatacaggaacgacgcaatcgtacagaactcagctgaataattttaaagcaaaaactccaaatagtagcgggatattactggaggactttgttacatggtcagcagatggtgaacataagattgttcgtggagatggtgaaagttatcagatgtttacgaagaaacctgtaacagaccaatacggagttcatcaaatactttcaatcacctccatggagcagagagctaaattagtttcagcgggatataggttctatggaactgacttgtatttatattggcgtgatagtattctagcctatccatttaactctagtaccgattggattaccaaccatggtgaccctacgacttggtattataacggaaatatggctcaggatggctatgatgtcttcactgttggggttggtgtaaacggggatcctggtacggatgaagcaacggctactagatttatgcagagcatctctagttctcctgacaactacactaacgtagcagatccatctcagattttacaagaattgaatcgctacttctatactatcgtcaatgagaagaaatctatcgaaaatggtacgattacagacccgatgggtgaactaattgatttccaattgggagcagatggaaggtttgatccagcggattacactttaactgcaaacgatggtagttcgttggtgaataatgtccctactgggggaccacaaaatgatggtggcttgctaaaaaatgcaaaagtgttctatgatacgactgagaaaaggattcgtgtaacaggtttgtaccttggaacgggtgaaaaagttacattgacttataatgttcgcttgaatgaccaatttgtaagcaataaattctatgacacgaatggtcgaacaaccctacaccctaaggaagtagaaaagaacacagtgcgcgacttcccgattcctaagattcgtgatgtacgaaagtatccagaaatcacaattccaaaagagaaaaaacttggtgaaattgagtttattaagatcaataagaatgataaaaaaccactgagagatgcggtctttagtcttcaaaaacaacatccggattatccagatatttatggagctattgatcaaaatggcacttatcaaaatgtgagaacaggtgaagatggtaagttgacctttaaaaatctgtcagatgggaaatatcgattatttgaaaattctgaaccagctggttataaacccgttcaaaataagcctatcgttgccttccaaatagtaaatggagaagtcagagatgtgacttcaatcgttccacaagatataccagcgggttacgagtttacgaatgataagcactatatcacaaatgagccaattcctccaaaaagagaatatcctcgaactggtggtatcggaatgttgccattctatctgataggttgcatgatgatgggaggagttctattatacacacggaaacatccgtaaagtgtagcaatgagaaatgataatatcgatactctgagcgatacttttaagaagtagcactcaagaagagatttaagtttacttggtgaaaacagttttcttcgccaagtaaaccaccattgaaaggggagatgttttcgaaaacttgcacagaaaaaaggattattattgtcatgtgtaattcattacattgctcacagttgattttaagagatatgaataaggagaaatcatgaaatcaatcaacaaatttttaacaatgcttgctgccttattactgacagcgagtagcctgttttcagctgcaacagtttttgcggcggacaatgttagtacagcaccagatgctgttactaaaactttaacaatccataagttactgctctcagaagatgatttaaagacttgggatacaaacggtcctaaaggatatgatggaactcaatctagtttaaaagatttaactggagttgtagctgaggaaattccaaatgtatactttgaattacaaaagtataatttgactgatggtaaggaaaaagaaaatcttaaagatgatagtaaatggacaacagttcatggtggtttgacaactaaagatggacttaaaattgaaaccagtactcttaaaggtgtgtatcgtattcgtgaggatagaacaaagactacctatgttggtcctaatgggcaagtattaacaggttcaaaagccgtacctgctcttgtaactcttccacttgttaacaataatggtacagtaattgatgcacatgttttccctaaaaattcatataataaaccagttgtagataaaagaattgctgatactttgaattataacgatcaaaatggtctgtctatcggtactaaaatcccatatgttgttaatacaacaattccaagtaatgcaacatttgcaacttcattttggtcagatgaaatgacagaaggtctaacttataatgaagatgtaacaattactttgaataatgtagctatggatcaagctgattatgaagtcactaaaggaaataatggctttaacttaaaattaacagaagcaggtttagctaaaattaatggtaaggatgcagaccaaaaaatccaaattacttactcagctactttgaactcacttgctgttgcagacattcccgaaagtaacgatattacatatcattacggaaatcatcaagatcatgggaatactccaaaaccaactaaacctaataatggtcaaattacagtaactaagacatgggacagtcaacctgctcctgagggggtgaaagcgactgttcaacttgtaaatgccaagactggtgagaaagtcggtgctcctgtagaactttcagaaaataattggacatatacttggagtggtctagataattctattgaatacaaagttgaagaagaatataatggatactcagctgaatacacagtagagagcaaagggaagttgggggtaaaaaactggaaagataataacccagctccaatcaatcctgaagaaccacgtgtaaaaacatacggtaaaaagtttgtcaaagtagaccaaaaagatactcgtctagaaaatgcgcagttcgttgttaaaaaagcagatagcaataaatatattgcctttaagtcaactgcacaacaagctgcagatgaaaaagcagcagcaactgcaaaacaaaaattggatgcagcggtagcagcttacacaaatgctgcagataagcaagccgctcaagctctagtagatcaagcacagcaagaatacaatgtagcttacaaagaagccaaatttggttatgttgaagtagctggaaaagatgaagcaatggttcttacttctaatacggatggtcaattccaaatttcaggtcttgctgctggtacttataaattagaagaaattaaagctccagaaggttttgcgaaaattgatgatgtagaatttgttgttggagcaggttcttggaatcaaggtgagtttaattacttaaaagatgttcaaaagaatgacgctacaaaagtagtcaacaaaaaaatcactatcccacaaacgggtggtattggtacaattatctttgctgtagcgggggctgcgattatgggtattgcagtgtacgcatatgttaaaaacaacaaagatgaggatcaacttgcttaagtaagagagaaaggagccattgatgacaatgcagaaaatgcagaaaatgattagtcgtatcttctttgttatggctctgtgtttttctcttgtatggggtgcacatgcagtccaagcgcaagaagatcacacgttggtcttgcaattggagaactatcaggaggtggttagtcaattgccatctcgtgatggtcatcggttgcaagtatggaagttggatgattcgtattcctatgatgatcgggtgcaaattgtaagagacttgcattcgtgggatgagaataaactttcttctttcaaaaagacttcgtttgagatgaccttccttgagaatcagattgaagtatctcatattccaaatggtctttactatgttcgctctattatccagacggatgcggtttcttatccagctgaatttctttttgaaatgacagatcaaacggtagagcctttggtcattgtagcgaaaaaaacagatacaatgacaacaaaggtgaagctgataaaggtggatcaagaccacaatcgcttggagggtgtcggctttaaattggtatcagtagcaagagatggttctgaaaaagaggttcccttgattggagaataccgttacagttcttctggtcaagtagggagaactctctatactgataaaaatggagagatttttgtgacaaatcttcctcttgggaactatcgtttcaaggaggtggagccactggcaggctatgctgttacgacgctggatacggatgtccagctggtagatcatcagctggtgacgattacggttgtcaatcagaaattaccacgtggcaatgttgactttatgaaggtggatggtcggaccaatacctctcttcaaggggcaatgttcaaagtcatgaaagaagaaagcggacactatactcctgttcttcaaaatggtaaggaagtagttgtaacatcagggaaagatggtcgtttccgagtggaaggtctagagtatgggacatactatttatgggagctccaagctccaactggttatgttcaattaacatcgcctgtttcctttacaatcgggaaagatactcgtaaggaactggtaacagtggttaaaaataacaagcgaccacggattgatgtgccagatacaggggaagaaaccttgtatatcttgatgcttgttgccattttgttgtttggtagtggttattatcttacgaaaaaaccaaataactgatattcaatgtacatcattatgaaaaagatagcaggctgaagggaagaccagagtactctgaggtgatgttaatcaggaatcatggtgatgtggcatgaatcacaataacggatatgaggctgggcagattgtgccagcctcattgtgggttattgtttgtaaaacgataggactggtctggtaatcattttaggaatggacaggactgggattctgatttaaaatggatggtgaatcagaaagaaatgagattttctcgtttctcttagcagataggattgtctgttaggaaaagcgataaaatgatgagtttgaagataaagggatgctgataaaaatggtaaaaacaaaaaagcaaaaacgaaataatctcctattaggagtggtatttttcattggaatggcggtaatggcgtatccgctggtgtctcgcttgtattatcgagtggaatcaaatcaacaaattgctgactttgataaggaaaaagcaacgttggatgaggctgacattgatgaacgaatgaaattggcacaagccttcaatgactctttgaataatgtagtgagtggcgatccttggtcggaagaaatgaagaaaaaagggcgagcagagtatgcacgtatgttagaaatccatgagcggatggggcatgtggaaatccccgttattgacgtggatttgccggtttatgctggtactgctgaagaggtattgcagcaaggggctgggcatctagagggaacttctctgccgatcggaggcaattcgacccatgcggtgattacggcacatacaggtttgccaacagctaagatgtttacggatttgaccaaacttaaagttggggataagttttatgtgcacaatatcaaggaagtgatggcctatcaagtggatcaagtaaaggtgattgagccgacgaactttgatgatttattgattgtaccaggtcatgattatgtgaccttgctgacttgtacgccatacatgatcaatacccatcgtctattggttcgggggcatcggataccgtacgtagcagaggttgaggaagaatttattgcagcaaacaaactcagtcatctctatcgctacctgttttatgtggcagttggtttgattgtgattcttttatggattattcgacgcttgcgcaagaagaaaaaacaaccggaaaaggctttgaaggcgctgaaagcagcaaggaaggaagtgaaggtggaggatggacaacagtagacgttcacgaaaaaaaggcacaaaaaagaagaaacatccgctgatccttcttctgattttcttagtaggattcgccgttgcgatatatccattggtgtctcgttattattatcgtattgagtcaaacgaggttattaaagagtttgatgagacggtttcccagatggataaggcagaacttgaggagcgttggcgcttggctcaagccttcaatgcgaccttgaaaccatctgaaattcttgatccttttacagagcaagagaaaaagaaaggcgtctcagaatatgccaatatgctaaaggtccatgagcggattggctatgtggaaattcctgcgattgatcaggaaattccgatgtatgtcggaacgagtgaggaaattcttcagaagggcgcaggattgctagagggagcttcgttaccggttggtggtgaaaatacccacacagttgtcactgctcatagaggattaccgacggcagaactgtttagtcaattggataagatgaaaaaaggggatgtcttttatcttcacgttttagaccaggtgttggcctaccaagtggatcagattttgacggttgagccaaatgactttgagcctgtcttgattcaacatggggaagattatgcgaccttgttgacctgtacaccgtatatgattaacagtcatcgtctgttggtacgtgggaagcggattccgtatacggcaccaattgcagagcgaaatcgagcggtgagagagcgtgggcaattctggttgtggttattgctagcggcgttggttatgattctggtattgagttacggggtgtatcgtcatcgtcgcattgtcaaagggctagaaaaacaattggaggagcatcatgtcaaaggctaagctacagaaattactagggtatttgctgatgctggtagcattggtgattcctgtttattgttttgggcagatggtgttacagtctttaggacaagtaaaaggtcatgagatattttcagaatctgtgacggccgacagttaccaagagcaattgcaacggtcgcttgattacaatcaacgcttggattcgcaaaatcgtattgtagatccttttttggcggaagggtatgaggtaaattaccaagtgtctgacgatcctgatgcagtctacggctatttgtcgattccgagtttggaaatcatggagccagtttatctaggagcggattaccatcatttagcaatggggttggcccatgtggatgggacgcctcttcctgttgagggaaaagggattcgttcagtgattgctgggcaccgtgcagaaccaagccatgtctttttccgccatttggatcagctaaaagttggagatgctctttattatgataatggccaggaaattgtagaatatcagatgatggacacagagattattttaccgtcggaatgggaaaaattagaatcggttagctctaaaaatatcatgaccttgataacctgcgatccgattcctacctttaataaacgcttattagtgaattttgaacgagtcgctgtttatcaaaaatcagatccacaaacagctgcagttgcgagggttgcttttacgaaagaaggacaatctgtatcgcgtgttgcaacctctcaatggttgtaccgtgggctagtggtactggcatttctgggaatcctgtttgttttgtggaagctagcacgtttactacgagggaaataaaaagaaatgaaaggaaagctaaggctgttcctttttccggctctttgtcaactgtag

SEQ ID NO: 688 - DNA, 11345 bp, Streptococcus pneumoniae
gcgcttttcattataagtcttatgggacttttttgatactcaaaaagccctataatctccacagtgggatttacccactacagaaattatagagccagaaaaaacacttttgttcactagcagaaactagagagcagaagtgtttttctgttcagatttacccaaaactgggaaatatggggataagaatagagatggcttaggaagcccctttttgtgtgtagacagtacgatgaacttataacaaatagtgagcctttttagcaatcattgcgacccgtttgtcaaaagcctcttttcggatatctacaattgtctgatagatgagacgctgttggctaacatgcaaatctaaggcaatcgtcaaaaagtgatgtttccctttgggatactgctttttaacgtaaggcaggtattctttcgttgtaataataatcaatggctctgtcaaatgctcctctgaaggaggaggactaattagaatattgtatcctgtaacagaggcaactttgtcagtaaaattccgtaaaataatggactttattaagtttacatctgcttgattatttaaaatgataaaaatcgggatagcaggtagtgaggaaaagatggtttctgtcaagtagagtgagaaaaggtacagccgatgctggtcgataactccttcaatcttctgctcagtcatccactcttgaacaattgctttcgaaatatgatacagtggcttgtcgctttcaatcccataatgttcgtaataattataatagggaactagattttgtaaaccaaacaaaaacgttcttgttaagaaagtcagtgctgttaaaaaagaaagagaattcgaaatgtcatttcctaagatattcttgaacttggatagtagatgctttcctcttgtatgctgaagaatcagttgaatagtatgagtctttttttcttgattccatttgtccttggaaaacgaagaattagcagaacaataaaccaaaaagatataatccagttcttcctgagtaaaagtcatgttggcatgtggctctaagtaagtttggcaatgttccatcaaaatcggatacataaagaggttttttaatttttcaaactctttggactcagggaactcaagtggaaattcccgacgtttccaagtgagtgccactagtatgctaaaatgaacatactcgtcaggtgtgatttctaacagttcatgactgagttgagaattagactgcacaatcatatgtgtgacccaatccatacttccatcattcaaatcataaatctcaataccaaaatgaaactggaggagtgcaattaaaaaacgaatgcgatattcaggaccaactacttgatttttcacaaggtccaaacctactgaacgtagtaacaagccacacttttgtcgtacgcggtagcctgttgcgatggaaatatactctttttgtgtaaattcgttaaagctttgattaccttgtagtagaaagaagcggagtatttttaaaatagttgattggttataaagctgatggaagtaataattcgtttgatgagaatggtgttcgattaattgaacttgttgcgtatctaaattaaatgtcaactcttcctcgaatgtttcttgtaattcctgcaaaatgcttaggagacttttagattgtaatgaagttaaagtagacagttcatctagttcaatagaccgaatatccaataatatatttaaaatggtaattttatctgtaattcttttttcaatgtatttgtttagcatagttaccgaatcttagttgcatatagataattttaattattataatacaaaagaaactaattgtcttgtcaaaaaggttgtggaatttccgactttattgataaaacagcatgtaataaaaggcattttaaagatagtaatgagtattggtggagttttatggcttattttttttattagaaaatatttttttatcaaatattgtcgttctataaaaaaatatgtgataaaaatatctattgtgatggaagttgttttaatttatactaggatagttaatagtaatactatactatactatattgtatacaagtgtgtcattgccaggttgagaagatagctataacgcacttttatacgcttttgctacgtttgttagtgaacggattaactcagtgagataaattttatcagaacataagtaatccgtttcttcgtgtatacagattgaaagtacctatgaatcatagaaggattaacttgttctatgaataatgcttaacagggagacacacatgaaaaaagtaagaaagatatttcagaaggcagttgcaggactgtgctgtatatctcagttgacagctttttcttcgatagttgctttagcagaaacgcctgaaaccagtccagcgataggaaaagtagtgattaaggagacaggcgaaggaggagcgcttctaggagatgccgtctttgagttgaaaaacaatacggatggcacaactgtttcgcaaaggacagaggcgcaaacaggagaagcgatattttcaaacataaaacctgggacatacaccttgacagaagcccaacctccagttggttataaaccctctactaaacaatggactgttgaagttgagaagaatggtcggacgactgtccaaggtgaacaggtagaaaatcgagaagaggctctatctgaccagtatccacaaacagggacttatccagatgttcaaacaccttatcagattattaaggtagatggttcggaaaaaaacggacagcacaaggcgttgaatccgaatccatatgaacgtgtgattccagaaggtacactttcaaagagaatttatcaagtgaataatttggatgataaccaatatggaatcgagttgacggttagtggtaaaacgacggttgaaacgaaagaagcctctactccgctagatgttgttattctattagataactccaatagtatgagtaatattcgacataatcatgcccatcgagcggaaaaagcgggagaagcgacacgagcccttgtagataagattacctccaatccagataatcgagtagcacttgtgacttatggctcaactatctttgacggttcagaagctactgtggaaaaaggggtagcagatgcgaacggaaaaatattgaatgactcagctttatggacgttcgatcgtacgacgtttacagctaaaacttataattatagctttttaaatctcacatcagatcctactgatattcaaactattaaggataggattccatcagatgcagaggaattgaacaaagacaaattgatgtatcaattcggcgcgacttttacccagaaggctttgatgaccgctgatgatatcttgacaaagcaggcaagaccaaacagtaaaaaggttattttccacattacagatggtgttccgactatgtcatatccaattaattttaaatatacaggaacgacgcaatcgtacagaactcagctgaataattttaaagcaaaaactccaaatagtagcgggatattactggaggactttgttacatggtcagcagatggtgaacataagattgttcgtggagatggtgaaagttatcagatgtttacgaagaaacctgtaacagaccaatacggagttcatcaaatactttcaatcacctccatggagcagagagctaaattagtttcagcgggatataggttctatggaactgacttgtatttatattggcgtgatagtattctagcctatccatttaactctagtaccgattggattaccaaccatggtgaccctacgacttggtattataacggaaatatggctcaggatggctatgatgtcttcactgttggggttggtgtaaacggggatcctggtacggatgaagcaacggctactagatttatgcagagcatctctagttctcctgacaactacactaacgtagcagatccatctcagattttacaagaattgaatcgctacttctatactatcgtcaatgagaagaaatctatcgaaaatggtacgattacagacccgatgggtgaactaattgatttccaattgggagcagatggaaggtttgatccagcggattacactttaactgcaaacgatggtagttcgttggtgaataatgtccctactgggggaccacaaaatgatggtggcttgctaaaaaatgcaaaagtgttctatgatacgactgagaaaaggattcgtgtaacaggtttgtaccttggaacgggtgaaaaagttacattgacttataatgttcgcttgaatgaccaatttgtaagcaataaattctatgacacgaatggtcgaacaaccctacaccctaaggaagtagaaaagaacacagtgcgcgacttcccgattcctaagattcgtgatgtacgaaagtatccagaaatcacaattccaaaagagaaaaaacttggtgaaattgagtttattaagatcaataagaatgataaaaaaccactgagagatgcggtctttagtcttcaaaaacaacatccggattatccagatatttatggagctattgatcaaaatggcacttatcaaaatgtgagaacaggtgaagatggtaagttgacctttaaaaatctgtcagatgggaaatatcgattatttgaaaattctgaaccagctggttataaacccgttcaaaataagcctatcgttgccttccaaatagtaaatggagaagtcagagatgtgacttcaatcgttccacaagatataccagcgggttacgagtttacgaatgataagcactatatcacaaatgagccaattcctccaaaaagagaatatcctcgaactggtggtatcggaatgttgccattctatctgataggttgcatgatgatgggaggagttctattatacacacggaaacatccgtaaagtgtagcaatgagaaatgataatatcgatactctgagcgatacttttaagaagtagcactcaagaagagatttaagtttacttggtgaaaacagttttcttcgccaagtaaaccaccattgaaaggggagatgttttcgaaaacttgcacagaaaaaaggattattattgtcatgtgtaattcattacattgctcacagttgattttaagagatatgaataaggagaaatcatgaaatcaatcaacaaatttttaacaatgcttgctgccttattactgacagcgagtagcctgttttcagctgcaacagtttttgcggcggacaatgttagtacagcaccagatgctgttactaaaactttaacaatccataagttactgctctcagaagatgatttaaagacttgggatacaaacggtcctaaaggatatgatggaactcaatctagtttaaaagatttaactggagttgtagctgaggaaattccaaatgtatactttgaattacaaaagtataatttgactgatggtaaggaaaaagaaaatcttaaagatgatagtaaatggacaacagttcatggtggtttgacaactaaagatggacttaaaattgaaaccagtactcttaaaggtgtgtatcgtattcgtgaggatagaacaaagactacctatgttggtcctaatgggcaagtattaacaggttcaaaagccgtacctgctcttgtaactcttccacttgttaacaataatggtacagtaattgatgcacatgttttccctaaaaattcatataataaaccagttgtagataaaagaattgctgatactttgaattataacgatcaaaatggtctgtctatcggtactaaaatcccatatgttgttaatacaacaattccaagtaatgcaacatttgcaacttcattttggtcagatgaaatgacagaaggtctaacttataatgaagatgtaacaattactttgaataatgtagctatggatcaagctgattatgaagtcactaaaggaaataatggctttaacttaaaattaacagaagcaggtttagctaaaattaatggtaaggatgcagaccaaaaaatccaaattacttactcagctactttgaactcacttgctgttgcagacattcctgaaagtaacgatattacatatcattacggaaatcatcaagatcatgggaatactccaaaaccaactaaacctaataatggtcaaattacagtaactaagacatgggacagtcaacctgctcctgagggggtgaaagcgactgttcaacttgtaaatgccaagactggtgagaaagtcggtgctcctgtagaactttcagaaaataattggacatatacttggagtggtctagataattctattgaatacaaagttgaagaagaatataatggatactcagctgaatacacagtagagagcaaagggaagttgggggtaaaaaactggaaagataataacccagctccaatcaatcctgaagaaccacgtgtaaaaacatacggtaaaaagtttgtcaaagtagaccaaaaagatactcgtctagaaaatgcgcagttcgttgttaaaaaagcagatagcaataaatatattgcctttaagtcaactgcacaacaagctgcagatgaaaaagcagcagcaactgcaaaacaaaaattggatgcagcggtagcagcttacacaaatgctgcagataagcaagccgctcaagctctagtagatcaagcacagcaagaatacaatgtagcttacaaagaagccaaatttggttatgttgaagtagctggaaaagatgaagcaatggttcttacttctaatacggatggtcaattccaaatttcaggtcttgctgctggtacttataaattagaagaaattaaagctccagaaggttttgcgaaaattgatgatgtagaatttgttgttggagcaggttcttggaatcaaggtgagtttaattacttaaaagatgttcaaaagaatgacgctacaaaagtagtcaacaaaaaaatcactatcccacaaacgggtggtattggtacaattatctttgctgtagcgggggctgcgattatgggtattgcagtgtacgcatatgttaaaaacaacaaagatgaggatcaacttgcttaagtaagagagaaaggagccattgatgacaatgcagaaaatgcagaaaatgattagtcgtatcttctttgttatggctctgtgtttttctcttgtatggggtgcacatgcagtccaagcgcaagaagatcacacgttggtcttgcaattggagaactatcaggaggtggttagtcaattgccatctcgtgatggtcatcggttgcaagtatggaagttggatgattcgtattcctatgatgatcgggtgcaaattgtaagagacttgcattcgtgggatgagaataaactttcttctttcaaaaagacttcgtttgagatgaccttccttgagaatcagattgaagtatctcatattccaaatggtctttactatgttcgctctattatccagacggatgcggtttcttatccagctgaatttctttttgaaatgacagatcaaacggtagagcctttggtcattgtagcgaaaaaaacagatacaatgacaacaaaggtgaagctgataaaggtggatcaagaccacaatcgcttggagggtgtcggctttaaattggtatcagtagcaagagatggttctgaaaaagaggttcccttgattggagaataccgttacagttcttctggtcaagtagggagaactctctatactgataaaaatggagagatttttgtgacaaatcttcctcttgggaactatcgtttcaaggaggtggagccactggcaggctatgctgttacgacgctggatacggatgtccagctggtagatcatcagctggtgacgattacggttgtcaatcagaaattaccacgtggcaatgttgactttatgaaggtggatggtcggaccaatacctctcttcaaggggcaatgttcaaagtcatgaaagaagaaagcggacactatactcctgttcttcaaaatggtaaggaagtagttgtaacatcagggaaagatggtcgtttccgagtggaaggtctagagtatgggacatactatttatgggagctccaagctccaactggttatgttcaattaacatcgcctgtttcctttacaatcgggaaagatactcgtaaggaactggtaacagtggttaaaaataacaagcgaccacggattgatgtgccagatacaggggaagaaaccttgtatatcttgatgcttgttgccattttgttgtttggtagtggttattatcttacgaaaaaaccaaataactgatattcaatgtacatcattatgaaaaagatagcaggctgaagggaagaccagagtactctgaggtgatgttaatcaggaatcatggtgatgtggcatgaatcacaataacggatatgaggctgggcagattgtgccagcctcattgtgggttattgtttgtaaaacgataggactggtctggtaatcattttaggaatggacaggactgggattctgatttaaaatggatggtgaatcagaaagaaatgagattttctcgtttctcttagcagataggattgtctgttaggaaaagcgataaaatgatgagtttgaagataaagggatgctgataaaaatggtaaaaacaaaaaagcaaaaacgaaataatctcctattaggagtggtatttttcattggaatggcggtaatggcgtatccgctggtgtctcgcttgtattatcgagtggaatcaaatcaacaaattgctgactttgataaggaaaaagcaacgttggatgaggctgacattgatgaacgaatgaaattggcacaagccttcaatgactctttgaataatgtagtgagtggcgatccttggtcggaagaaatgaagaaaaaagggcgagcagagtatgcacgtatgttagaaatccatgagcggatggggcatgtggaaatccccgttattgacgtggatttgccggtttatgctggtactgctgaagaggtattgcagcaaggggctgggcatctagagggaacttctctgccgatcggaggcaattcgacccatgcggtgattacggcacatacaggtttgccaacagctaagatgtttacggatttgaccaaacttaaagttggggataagttttatgtgcacaatatcaaggaagtgatggcctatcaagtggatcaagtaaaggtgattgagccgacgaactttgatgatttattgattgtaccaggtcatgattatgtgaccttgctgacttgtacgccatacatgatcaatacccatcgtctattggttcgggggcatcggataccgtacgtagcagaggttgaggaagaatttattgcagcaaacaaactcagtcatctctatcgctacctgttttatgtggcagttggtttgattgtgattcttttatggattattcgacgcttgcgcaagaagaaaaaacaaccggaaaaggctttgaaggcgctgaaagcagcaaggaaggaagtgaaggtggaggatggacaacagtagacgttcacgaaaaaaaggcacaaaaaagaagaaacatccgctgatccttcttctgattttcttagtaggattcgccgttgcgatatatccattggtgtctcgttattattatcgtattgagtcaaacgaggttattaaagagtttgatgagacggtttcccagatggataaggcagaacttgaggagcgttggcgcttggctcaagccttcaatgcgaccttgaaaccatctgaaattcttgatccttttacagagcaagagaaaaagaaaggcgtctcagaatatgccaatatgctaaaggtccatgagcggattggctatgtggaaattcctgcgattgatcaggaaattccgatgtatgtcggaacgagtgaggaaattcttcagaagggcgcaggattgctagagggagcttcgttaccggttggtggtgaaaatacccacacagttgtcactgctcatagaggattaccgacggcagaactgtttagtcaattggataagatgaaaaaaggggatgtcttttatcttcacgttttagaccaggtgttggcctaccaagtggatcagattttgacggttgagccaaatgactttgagcctgtcttgattcaacatggggaagattatgcgaccttgttgacctgtacaccgtatatgattaacagtcatcgtctgttggtacgtgggaagcggattccgtatacggcaccaattgcagagcgaaatcgagcggtgagagagcgtgggcaattctggttgtggttattgctagcggcgttggttatgattctggtattgagttacggggtgtatcgtcatcgtcgcattgtcaaagggctagaaaaacaattggaggagcatcatgtcaaaggctaagctacagaaattactagggtatttgctgatgctggtagcattggtgattcctgtttattgttttgggcagatggtgttacagtctttaggacaagtaaaaggtcatgagatattttcagaatctgtgacggccgacagttaccaagagcaattgcaacggtcgcttgattacaatcaacgcttggattcgcaaaatcgtattgtagatccttttttggcggaagggtatgaggtaaattaccaagtgtctgacgatcctgatgcagtctacggctatttgtcgattccgagtttggaaatcatggagccagtttatctaggagcggattaccatcatttagcaatggggttggcccatgtggatgggacgcctcttcctgttgagggaaaagggattcgttcagtgattgctgggcaccgtgcagaaccaagccatgtctttttccgccatttggatcagctaaaagttggagatgctctttattatgataatggccaggaaattgtagaatatcagatgatggacacagagattattttaccgtcggaatgggaaaaattagaatcggttagctctaaaaatatcatgaccttgataacctgcgatccgattcctacctttaataaacgcttattagtgaattttgaacgagtcgctgtttatcaaaaatcagatccacaaacagctgcagttgcgagggttgcttttacgaaagaaggacaatctgtatcgcgtgttgcaacctctcaatggttgtaccgtgggctagtggtactggcatttctgggaatcctgtttgttttgtggaagctagcacgtttactacgagggaaataaaaagaaatgaaaggaaagctaaggctgttcctttttccggctctttgtcaactgtag

SEQ ID NO: 689 - DNA, 11350 bp, Streptococcus pneumoniae
gtttaggcgcttttcattataagtcttatgggacttttttgatactcaaaaagccctataatctccacagtgggatttacccactacagaaattatagagccagaaaaaacacttttgttcactagcagaaactagagagcagaagtgtttttctgttcagatttacccaaaactgggaaatatggggataagaatagagatggcttaggaagcccctttttgtgtgtagacagtacgatgaacttataacaaatagtgagcctttttagcaatcattgcgacccgtttgtcaaaagcctcttttcggatatctacaattgtctgatagatgagacgctgttggctaacatgcaaatctaaggcaatcgtcaaaaagtgatgtttccctttgggatactgctttttaacgtaaggcaggtattctttcgttgtaataataatcaatggctctgtcaaatgctcctctgaaggaggaggactaattagaatattgtatcctgtaacagaggcaactttgtcagtaaaattccgtaaaataatggactttattaagtttacatctgcttgattatttaaaatgataaaaatcgggatagcaggtagtgaggaaaagatggtttctgtcaagtagagtgagaaaaggtacagccgatgctggtcgataactccttcaatcttctgctcagtcatccactcttgaacaattgctttcgaaatatgatacagtggcttgtcgctttcaatcccataatgttcgtaataattataatagggaactagattttgtaaaccaaacaaaaacgttcttgttaagaaagtcagtgctgttaaaaaagaaagagaattcgaaatgtcatttcctaagatattcttgaacttggatagtagatgctttcctcttgtatgctgaagaatcagttgaatagtatgagtctttttttcttgattccatttgtccttggaaaacgaagaattagcagaacaataaaccaaaaagatataatccagttcttcctgagtaaaagtcatgttggcatgtggctctaagtaagtttggcaatgttccatcaaaatcggatacataaagaggttttttaatttttcaaactctttggactcagggaactcaagtggaaattcccgacgtttccaagtgagtgccactagtatgctaaaatgaacatactcgtcaggtgtgatttctaacagttcatgactgagttgagaattagactgcacaatcatatgtgtgacccaatccatacttccatcattcaaatcataaatctcaataccaaaatgaaactggaggagtgcaattaaaaaacgaatgcgatattcaggaccaactacttgatttttcacaaggtccaaacctactgaacgtagtaacaagccacacttttgtcgtacgcggtagcctgttgcgatggaaatatactctttttgtgtaaattcgttaaagctttgattaccttgtagtagaaagaagcggagtatttttaaaatagttgattggttataaagctgatggaagtaataattcgtttgatgagaatggtgttcgattaattgaacttgttgcgtatctaaattaaatgtcaactcttcctcgaatgtttcttgtaattcctgcaaaatgcttaggagacttttagattgtaatgaagttaaagtagacagttcatctagttcaatagaccgaatatccaataatatatttaaaatggtaattttatctgtaattcttttttcaatgtatttgtttagcatagttaccgaatcttagttgcatatagataattttaattattataatacaaaagaaactaattgtcttgtcaaaaaggttgtggaatttccgactttattgataaaacagcatgtaataaaaggcattttaaagatagtaatgagtattggtggagttttatggcttattttttttattagaaaatatttttttatcaaatattgtcgttctataaaaaaatatgtgataaaaatatctattgtgatggaagttgttttaatttatactaggatagtaatagtaatactatactatactatattgtatacaagtgtgtcattgccaggttgagaagatagctataacgcacttttatacgcttttgctacgtttgttagtgaacggattaactcagcatgagataaattttatcagaataagtaatccgtttcttcgtgtatacagattgaaagtacctatgaatcatagaaggattaacttgttctatgaataatgcttaacagggagacacacatgaaaaaagtaagaaagatatttcagaaggcagttgcaggactgtgctgtatatctcagttgacagctttttcttcgatagttgctttagcagaaacgcctgaaaccagtccagcgataggaaaagtagtgattaaggagacaggcgaaggaggagcgcttctaggagatgccgtctttgagttgaaaaacaatacggatggcacaactgtttcgcaaaggacagaggcgcaaacaggagaagcgatattttcaaacataaaacctgggacatacaccttgacagaagcccaacctccagttggttataaaccctctactaaacaatggactgttgaagttgagaagaatggtcggacgactgtccaaggtgaacaggtagaaaatcgagaagaggctctatctgaccagtatccacaaacagggacttatccagatgttcaaacaccttatcagattattaaggtagatggttcggaaaaaaacggacagcacaaggcgttgaatccgaatccatatgaacgtgtgattccagaaggtacactttcaaagagaatttatcaagtgaataatttggatgataaccaatatggaatcgagttgacggttagtggtaaaacgacggttgaaacgaaagaagcctctactccgctagatgttgttattctattagataactccaatagtatgagtaatattcgacataatcatgcccatcgagcggaaaaagcgggagaagcgacacgagcccttgtagataagattacctccaatccagataatcgagtagcacttgtgacttatggctcaactatctttgacggttcagaagctactgtggaaaaaggggtagcagatgcgaacggaaaaatattgaatgactcagctttatggacgttcgatcgtacgacgtttacagctaaaacttataattatagctttttaaatctcacatcagatcctactgatattcaaactattaaggataggattccatcagatgcagaggaattgaacaaagacaaattgatgtatcaattcggcgcgacttttacccagaaggctttgatgaccgctgatgatatcttgacaaagcaggcaagaccaaacagtaaaaaggttattttccacattacagatggtgttccgactatgtcatatccaattaattttaaatatacaggaacgacgcaatcgtacagaactcagctgaataattttaaagcaaaaactccaaatagtagcgggatattactggaggactttgttacatggtcagcagatggtgaacataagattgttcgtggagatggtgaaagttatcagatgtttacgaagaaacctgtaacagaccaatacggagttcatcaaatactttcaatcacctccatggagcagagagctaaattagtttcagcgggatataggttctatggaactgacttgtatttatattggcgtgatagtattctagcctatccatttaactctagtaccgattggattaccaaccatggtgaccctacgacttggtattataacggaaatatggctcaggatggctatgatgtcttcactgttggggttggtgtaaacggggatcctggtacggatgaagcaacggctactagatttatgcagagcatctctagttctcctgacaactacactaacgtagcagatccatctcagattttacaagaattgaatcgctacttctatactatcgtcaatgagaagaaatctatcgaaaatggtacgattacagacccgatgggtgaactaattgatttccaattgggagcagatggaaggtttgatccagcggattacactttaactgcaaacgatggtagttcgttggtgaataatgtccctactgggggaccacaaaatgatggtggcttgctaaaaaatgcaaaagtgttctatgatacgactgagaaaaggattcgtgtaacaggtttgtaccttggaacgggtgaaaaagttacattgacttataatgttcgcttgaatgaccaatttgtaagcaataaattctatgacacgaatggtcgaacaaccctacaccctaaggaagtagaaaagaacacagtgcgcgacttcccgattcctaagattcgtgatgtacgaaagtatccagaaatcacaattccaaaagagaaaaaacttggtgaaattgagtttattaagatcaataagaatgataaaaaaccactgagagatgcggtctttagtcttcaaaaacaacatccggattatccagatatttatggagctattgatcaaaatggcacttatcaaaatgtgagaacaggtgaagatggtaagttgacctttaaaaatctgtcagatgggaaatatcgattatttgaaaattctgaaccagctggttataaacccgttcaaaataagcctatcgttgccttccaaatagtaaatggagaagtcagagatgtgacttcaatcgttccacaagatataccagcgggttacgagtttacgaatgataagcactatatcacaaatgagccaattcctccaaaaagagaatatcctcgaactggtggtatcggaatgttgccattctatctgataggttgcatgatgatgggaggagttctattatacacacggaaaaatccgtaaagtgtagcaatgagaaatgataatatcgatactctgagcgatacttttaagaagtagcactcaagaagagatttaagtttacttggtgaaaacagttttcttcgccaagtaaaccaccattgaaaggggagatgttttcgaaaacttgcacagaaaaaaggattattattgtcatgtgtaattcattacattgctcacagttgattttaagagatatgaataaggagaaatcatgaaatcaatcaacaaatttttaacaatgcttgctgccttattactgacagcgagtagcctgttttcagctgcaacagtttttgcggcggacaatgttagtacagcaccagatgctgttactaaaactttaacaatccataagttactgctctcagaagatgatttaaagacttgggatacaaacggtcctaaaggatatgatggaactcaatctagtttaaaagatttaactggagttgtagctgaggaaattccaaatgtatactttgaattacaaaagtataatttgactgatggtaaggaaaaagaaaatcttaaagatgatagtaaatggacaacagttcatggtggtttgacaactaaagatggacttaaaattgaaaccagtactcttaaaggtgtgtatcgtattcgtgaggatagaacaaagactacctatgttggtcctaatgggcaagtattaacaggttcaaaagccgtacctgctcttgtaactcttccacttgttaacaataatggtacagtaattgatgcacatgttttccctaaaaattcatataataaaccagttgtagataaaagaattgctgatactttgaattataacgatcaaaatggtctgtctatcggtactaaaatcccatatgttgttaatacaacaattccaagtaatgcaacatttgcaacttcattttggtcagatgaaatgacagaaggtctaacttataatgaagatgtaacaattactttgaataatgtagctatggatcaagctgattatgaagtcactaaaggaaytaatggctttaacttaaaattaacagaagcaggtttagctaaaattaatggtaaggatgcagaccaaaaaatccaaattacttactcagctactttgaactcacttgctgttgcagacattcctgaaagtaacgatattacatatcattacggaaatcatcaagatcatgggaatactccaaaaccaactaaacctaataatggtcaaattacagtaactaagacatgggacagtcaacctgctcctgagggggtgaaagcgactgttcaacttgtaaatgccaagactggtgagaaagtcggtgctcctgtagaactttcagaaaataattggacatatacttggagtggtctagataattctattgaatacaaagttgaagaagaatataatggatactcagctgaatacacagtagagagcaaagggaagttgggggtaaaaaactggaaagataataacccagctccaatcaatcctgaagaaccacgtgtaaaaacatacggtaaaaagtttgtcaaagtagaccaaaaagatactcgtctagaaaatgcgcagttcgttgttaaaaaagcagatagcaataaatatattgcctttaagtcaactgcacaacaagctgcagatgaaaaagcagcagcaactgcaaaacaaaaattggatgcagcggtagcagcttacacaaatgctgcagataagcaagccgctcaagctctagtagatcaagcacagcaagaatacaatgtagcttacaaagaagccaaatttggttatgttgaagtagctggaaaagatgaagcaatggttcttacttctaatacggatggtcaattccaaatttcaggtcttgctgctggtacttataaattagaagaaattaaagctccagaaggttttgcgaaaattgatgatgtagaatttgttgttggagcaggttcttggaatcaaggtgagtttaattacttaaaagatgttcaaaagaatgacgctacaaaagtagtcaacaaaaaaatcactatcccacaaacgggtggtattggtacaattatctttgctgtagcgggggctgcgattatgggtattgcagtgtacgcatatgttaaaaacaacaaagatgaggatcaacttgcttaagtaagagagaaaggagccattgatgacaatgcagaaaatgcagaaaatgattagtcgtatcttctttgttatggctctgtgtttttctcttgtatggggtgcacatgcagtccaagcgcaagaagatcacacgttggtcttgcaattggagaactatcaggaggtggttagtcaattgccatctcgtgatggtcatcggttgcaagtatggaagttggatgattcgtattcctatgatgatcgggtgcaaattgtaagagacttgcattcgtgggatgagaataaactttcttctttcaaaaagacttcgtttgagatgaccttccttgagaatcagattgaagtatctcatattccaaatggtctttactatgttcgctctattatccagacggatgcggtttcttatccagctgaatttctttttgaaatgacagatcaaacggtagagcctttggtcattgtagcgaaaaaaacagatacaatgacaacaaaggtgaagctgataaaggtggatcaagaccacaatcgcttggagggtgtcggctttaaattggtatcagtagcaagagatggttctgaaaaagaggttcccttgattggagaataccgttacagttcttctggtcaagtagggagaactctctatactgataaaaatggagagatttttgtgacaaatcttcctcttgggaactatcgtttcaaggaggtggagccactggcaggctatgctgttacgacgctggatacggatgtccagctggtagatcatcagctggtgacgattacggttgtcaatcagaaattaccacgtggcaatgttgactttatgaaggtggatggtcggaccaatacctctcttcaaggggcaatgttcaaagtcatgaaagaagaaagcggacactatactcctgttcttcaaaatggtaaggaagtagttgtaacatcagggaaagatggtcgtttccgagtggaaggtctagagtatgggacatactatttatgggagctccaagctccaactggttatgttcaattaacatcgcctgtttcctttacaatcgggaaagatactcgtaaggaactggtaacagtggttaaaaataacaagcgaccacggattgatgtgccagatacaggggaagaaaccttgtatatcttgatgcttgttgccattttgttgtttggtagtggttattatcttacgaaaaaaccaaataactgatattcaatgtacatcattatgaaaaagatagcaggctgaagggaagaccagagtactctgaggtgatgttaatcaggaatcatggtgatgtggcatgaatcacaataacggatatgaggctgggcagattgtgccagcctcattgtgggttattgtttgtaaaacgataggactggtctggtaatcattttaggaatggacaggactgggattctgatttaaaatggatggtgaatcagaaagaaatgagattttctcgtttctcttagcagataggattgtctgttaggaaaagcgataaaatgatgagtttgaagataaagggatgctgataaaaatggtaaaaacaaaaaagcaaaaacgaaataatctcctattaggagtggtatttttcattggaatggcggtaatggcgtatccgctggtgtctcgcttgtattatcgagtggaatcaaatcaacaaattgctgactttgataaggaaaaagcaacgttggatgaggctgacattgatgaacgaatgaaattggcacaagccttcaatgactctttgaataatgtagtgagtggcgatccttggtcggaagaaatgaagaaaaaagggcgagcagagtatgcacgtatgttagaaatccatgagcggatggggcatgtggaaatccccgttattgacgtggatttgccggtttatgctggtactgctgaagaggtattgcagcaaggggctgggcatctagagggaacttctctgccgatcggaggcaattcgacccatgcggtgattacggcacatacaggtttgccaacagcgaagatgtttacggatttgaccaaacttaaagttggggataagttttatgtgcacaatatcaaggaagtgatggcctatcaagtggatcaagtaaaggtgattgagccgacgaactttgatgatttattgattgtaccaggtcatgattatgtgaccttgctgacttgtacgccatacatgatcaatacccatcgtctattggttcgggggcatcggataccgtacgtagcagaggttgaggaagaatttattgcagcaaacaaactcagtcatctctatcgctacctgttttatgtggcagttggtttgattgtgattcttttatggattattcgacgcttgcgcaagaagaaaaaacaaccggaaaaggctttgaaggcgctgaaagcagcaaggaaggaagtgaaggtggaggatggacaacagtagacgttcacgaaaaaaaggcacaaaaaagaagaaacatccgctgatccttcttctgattttcttagtaggattcgccgttgcgatatatccattggtgtctcgttattattatcgtattgagtcaaacgaggttattaaagagtttgatgagacggtttcccagatggataaggcagaacttgaggagcgttggcgcttggctcaagccttcaatgcgaccttgaaaccatctgaaattcttgatccttttacagagcaagagaaaaagaaaggcgtctcagaatatgccaatatgctaaaggtccatgagcggattggctatgtggaaattcctgcgattgatcaggaaattccgatgtatgtcggaacgagtgaggaaattcttcagaagggcgcaggattgctagagggagcttcgttaccggttggtggtgaaaatacccacacagttgtcactgctcatagaggattaccgacggcagaactgtttagtcaattggataagatgaaaaaaggggatgtcttttatcttcacgttttagaccaggtgttggcctaccaagtggatcagattttgacggttgagccaaatgactttgagcctgtcttgattcaacatggggaagattatgcgaccttgttgacctgtacaccgtatatgattaacagtcatcgtctgttggtacgtgggaagcggattccgtatacggcaccaattgcagagcgaaatcgagcggtgagagagcgtgggcaattctggttgtggttattgctagcggcgttggttatgattctggtattgagttacggggtgtatcgtcatcgtcgcattgtcaaagggctagaaaaacaattggaggagcatcatgtcaaaggctaagctacagaaattactagggtatttgctgatgctggtagcattggtgattcctgtttattgttttgggcagatggtgttacagtctttaggacaagtaaaaggtcatgagatattttcagaatctgtgacggccgacagttaccaagagcaattgcaacggtcgcttgattacaatcaacgcttggattcgcaaaatcgtattgtagatccttttttggcggaagggtatgaggtaaattaccaagtgtctgacgatcctgatgcagtctacggctatttgtcgattccgagtttggaaatcatggagccagtttatctaggagcggattaccatcatttagcaatggggttggcccatgtggatgggacgcctcttcctgttgagggaaaagggattcgttcagtgattgctgggcaccgtgcagaaccaagccatgtctttttccgccatttggatcagctaaaagttggagatgctctttattatgataatggccaggaaattgtagaatatcagatgatggacacagagattattttaccgtcggaatgggaaaaattagaatcggttagctctaaaaatatcatgaccttgataacctgcgatccgattcctacctttaataaacgcttattagtgaattttgaacgagtcgctgtttatcaaaaatcagatccacaaacagctgcagttgcgagggttgcttttacgaaagaaggacaatctgtatcgcgtgttgcaacctctcaatggttgtaccgtgggctagtggtactggcatttatgggaatcctgtttgttttgtggaagctagcacgtttactacgagggaaataaaaagaaatgaaaggaaagctaaggctgttcctttttccggctctttgtcaactgtag

SEQ ID NO: 690 - DNA, 11349 bp, Streptococcus pneumoniae
tttaggcgcttttcattataagtcttatgggacttttttgatactcaaaaagccctataatctccacagtgggatttacccactacagaaattatagagccagaaaaaacacttttgttcactagcagaaactagagagcagaagtgtttttctgttcagatttacccaaaactgggaaatatggggataagaatagagatggcttaggaagcccctttttgtgtgtagacagtacgatgaacttataacaaatagtgagcctttttagcaatcattgcgacccgtttgtcaaaagcctcttttcggatatctacaattgtctgatagatgagacgctgttggctaacatgcaaatctaaggcaatcgtcaaaaagtgatgtttccctttgggatactgctttttaacgtaaggcaggtattctttcgttgtaataataatcaatggctctgtcaaatgctcctctgaaggaggaggactaattagaatattgtatcctgtaacagaggcaactttgtcagtaaaattccgtaaaataatggactttattaagtttacatctgcttgattatttaaaatgataaaaatcgggatagcaggtagtgaggaaaagatggtttctgtcaagtagagtgagaaaaggtacagccgatgctggtcgataactccttcaatcttctgctcagtcatccactcttgaacaattgctttcgaaatatgatacagtggcttgtcgctttcaatcccataatgttcgtaataattataatagggaactagattttgtaaaccaaacaaaaacgttcttgttaagaaagtcagtgctgttaaaaaagaaagagaattcgaaatgtcatttcctaagatattcttgaacttggatagtagatgctttcctcttgtatgctgaagaatcagttgaatagtatgagtctttttttcttgattccatttgtccttggaaaacgaagaattagcagaacaataaaccaaaaagatataatccagttcttcctgagtaaaagtcatgttggcatgtggctctaagtaagtttggcaatgttccatcaaaatcggatacataaagaggttttttaatttttcaaactctttggactcagggaactcaagtggaaattcccgacgtttccaagtgagtgccactagtatgctaaaatgaacatactcgtcaggtgtgatttctaacagttcatgactgagttgagaattagactgcacaatcatatgtgtgacccaatccatacttccatcattcaaatcataaatctcaataccaaaatgaaactggaggagtgcaattaaaaaacgaatgcgatattcaggaccaactacttgatttttcacaaggtccaaacctactgaacgtagtaacaagccacacttttgtcgtacgcggtagcctgttgcgatggaaatatactctttttgtgtaaattcgttaaagctttgattaccttgtagtagaaagaagcggagtatttttaaaatagttgattggttataaagctgatggaagtaataattcgtttgatgagaatggtgttcgattaattgaacttgttgcgtatctaaattaaatgtcaactcttcctcgaatgtttcttgtaattcctgcaaaatgcttaggagacttttagattgtaatgaagttaaagtagacagttcatctagttcaatagaccgaatatccaataatatatttaaaatggtaattttatctgtaattcttttttcaatgtatttgtttagcatagttaccgaatcttagttgcatatagataattttaattattataatacaaaagaaactaattgtcttgtcaaaaaggttgtggaatttccgactttattgataaaacagcatgtaataaaaggcattttaaagatagtaatgagtattggtggagttttatggcttattttttttattagaaaatatttttttatcaaatattgtcgttctataaaaaaatatgtgataaaaatatctattgtgatggaagttgttttaatttatactaggatagttaatagtaatactatactatactatattgtatacaagtgtgtcattgccaggttgagaagatagctataacgcacttttatacgcttttgctacgtttgttagtgaacggattaactcagcatgagataaattttatcagaataagtaatccgtttcttcgtgtatacagattgaaagtacctatgaatcatagaaggattaacttgttctatgaataatgcttaacagggagacacacatgaaaaaagtaagaaagatatttcagaaggcagttgcaggactgtgctgtatatctcagttgacagctttttcttcgatagttgctttagcagaaacgcctgaaaccagtccagcgataggaaaagtagtgattaaggagacaggcgaaggaggagcgcttctaggagatgccgtctttgagttgaaaaacaatacggatggcacaactgtttcgcaaaggacagaggcgcaaacaggagaagcgatattttcaaacataaaacctgggacatacaccttgacagaagcccaacctccagttggttataaaccctctactaaacaatggactgttgaagttgagaagaatggtcggacgactgtccaaggtgaacaggtagaaaatcgagaagaggctctatctgaccagtatccacaaacagggacttatccagatgttcaaacaccttatcagattattaaggtagatggttcggaaaaaaacggacagcacaaggcgttgaatccgaatccatatgaacgtgtgattccagaaggtacactttcaaagagaatttatcaagtgaataatttggatgataaccaatatggaatcgagttgacggttagtggtaaaacgacggttgaaacgaaagaagcctctactccgctagatgttgttattctattagataactccaatagtatgagtaatattcgacataatcatgcccatcgagcggaaaaagcgggagaagcgacacgagcccttgtagataagattacctccaatccagataatcgagtagcacttgtgacttatggctcaactatctttgacggttcagaagctactgtggaaaaaggggtagcagatgcgaacggaaaaatattgaatgactcagctttatggacgttcgatcgtacgacgtttacagctaaaacttataattatagctttttaaatctcacatcagatcctactgatattcaaactattaaggataggattccatcagatgcagaggaattgaacaaagacaaattgatgtatcaattcggcgcgacttttacccagaaggctttgatgaccgctgatgatatcttgacaaagcaggcaagaccaaacagtaaaaaggttattttccacattacagatggtgttccgactatgtcatatccaattaattttaaatatacaggaacgacgcaatcgtacagaactcagctgaataattttaaagcaaaaactccaaatagtagcgggatattactggaggactttgttacatggtcagcagatggtgaacataagattgttcgtggagatggtgaaagttatcagatgtttacgaagaaacctgtaacagaccaatacggagttcatcaaatactttcaatcacctccatggagcagagagctaaattagtttcagcgggatataggttctatggaactgacttgtatttatattggcgtgatagtattctagcctatccatttaactctagtaccgattggattaccaaccatggtgaccctacgacttggtattataacggaaatatggctcaggatggctatgatgtcttcactgttggggttggtgtaaacggggatcctggtacggatgaagcaacggctactagatttatgcagagcatctctagttctcctgacaactacactaacgtagcagatccatctcagattttacaagaattgaatcgctacttctatactatcgtcaatgagaagaaatctatcgaaaatggtacgattacagacccgatgggtgaactaattgatttccaattgggagcagatggaaggtttgatccagcggattacactttaactgcaaacgatggtagttcgttggtgaataatgtccctactgggggaccacaaaatgatggtggcttgctaaaaaatgcaaaagtgttctatgatacgactgagaaaaggattcgtgtaacaggtttgtaccttggaacgggtgaaaaagttacattgacttataatgttcgcttgaatgaccaatttgtaagcaataaattctatgacacgaatggtcgaacaaccctacaccctaaggaagtagaaaagaacacagtgcgcgacttcccgattcctaagattcgtgatgtacgaaagtatccagaaatcacaattccaaaagagaaaaaacttggtgaaattgagtttattaagatcaataagaatgataaaaaaccactgagagatgcggtctttagtcttcaaaaacaacatccggattatccagatatttatggagctattgatcaaaatggcacttatcaaaatgtgagaacaggtgaagatggtaagttgacctttaaaaatctgtcagatgggaaatatcgattatttgaaaattctgaaccagctggttataaacccgttcaaaataagcctatcgttgccttccaaatagtaaatggagaagtcagagatgtgacttcaatcgttccacaagatataccagcgggttacgagtttacgaatgataagcactatatcacaaatgagccaattcctccaaaaagagaatatcctcgaactggtggtatcggaatgttgccattctatctgataggttgcatgatgatgggaggagttctattatacacacggaaaaatccgtaaagtgtagcaatgagaaatgataatatcgatactctgagcgatacttttaagaagtagcactcaagaagagatttaagtttacttggtgaaaacagttttcttcgccaagtaaaccaccattgaaaggggagatgttttcgaaaacttgcacagaaaaaaggattattattgtcatgtgtaattcattacattgctcacagttgattttaagagatatgaataaggagaaatcatgaaatcaatcaacaaatttttaacaatgcttgctgccttattactgacagcgagtagcctgttttcagctgcaacagtttttgcggcggacaatgttagtacagcaccagatgctgttactaaaactttaacaatccataagttactgctctcagaagatgatttaaagacttgggatacaaacggtcctaaaggatatgatggaactcaatctagtttaaaagatttaactggagttgtagctgaggaaattccaaatgtatactttgaattacaaaagtataatttgactgatggtaaggaaaaagaaaatcttaaagatgatagtaaatggacaacagttcatggtggtttgacaactaaagatggacttaaaattgaaaccagtactcttaaaggtgtgtatcgtattcgtgaggatagaacaaagactacctatgttggtcctaatgggcaagtattaacaggttcaaaagccgtacctgctcttgtaactcttccacttgttaacaataatggtacagtaattgatgcacatgttttccctaaaaattcatataataaaccagttgtagataaaagaattgctgatactttgaattataacgatcaaaatggtctgtctatcggtactaaaatcccatatgttgttaatacaacaattccaagtaatgcaacatttgcaacttcattttggtcagatgaaatgacagaaggtctaacttataatgaagatgtaacaattactttgaataatgtagctatggatcaagctgattatgaagtcactaaaggaattaatggctttaacttaaaattaacagaagcaggtttagctaaaattaatggtaaggatgcagaccaaaaaatccaaattacttactcagctactttgaactcacttgctgttgcagacattcctgaaagtaacgatattacatatcattacggaaatcatcaagatcatgggaatactccaaaaccaactaaacctaataatggtcaaattacagtaactaagacatgggacagtcaacctgctcctgagggggtgaaagcgactgttcaacttgtaaatgccaagactggtgagaaagtcggtgctcctgtagaactttcagaaaataattggacatatacttggagtggtctagataattctattgaatacaaagttgaagaagaatataatggatactcagctgaatacacagtagagagcaaagggaagttgggggtaaaaaactggaaagataataacccagctccaatcaatcttgaagaaccacgtgtaaaaacatacggtaaaaagtttgtcaaagtagaccaaaaagatactcgtctagaaaatgcgcagttcgttgttaaaaaagcagatagcaataaatatattgcctttaagtcaactgcacaacaagctgcagatgaaaaagcagcagcaactgcaaaacaaaaattggatgcagcggtagcagcttacacaaatgctgcagataagcaagccgctcaagctctagtagatcaagcacagcaagaatacaatgtagcttacaaagaagccaaatttggttatgttgaagtagctggaaaagatgaagcaatggttcttacttctaatacggatggtcaattccaaatttcaggtcttgctgctggtacttataaattagaagaaattaaagctccagaaggttttgcgaaaattgatgatgtagaatttgttgttggagcaggttcttggaatcaaggtgagtttaattacttaaaagatgttcaaaagaatgacgctacaaaagtagtcaacaaaaaaatcacgatcccacaaacgggtggtattggtacaattatctttgctgtagcaggggctgtgattatgggtattgcagtgtacgcatatgttaaaaacaacaaagatgaggatcaacttgcttaagtaagagagaaaggagccattgatgacaatgcagaaaatgcagaaaatgattagtcgtatcttctttgttatggctctgtgtttttctcttgtatggggtgcacatgcagtccaagcgcaagaagatcacacgttggtcttgcaattggagaactatcaggaggtggttagtcaattgccatctcgtgatggtcatcggttgcaggtatggaagttggatgattcgtattcctatgataatcgggtgcaaattgtgagagacttgcattcgtgggatgagaataaactttcttctttcaaaaagacttcgtttgagatgaccttccttgagaatcagattgaagtatctcatattccaaatggtctttactatgttcgctctattatccagacggatgcggtttcttatccagctgaatttctttttgaaatgacagatcagacggtagagcctttggtcattgtagcgaaaaaagcagatacggtgacaacaaaggtgaagctgataaaggtggatcaagaccacaatcgcttggagggtgtcggctttaaattggtatcagtagcaagagatggttctgaaaaagaggttcccttgattggagaataccgttacagttcttctggtcaagtagggagaactctctatactgataaaaatggagagattgttgtgacaaatcttcctcttgggacctatcgtttcaaggaggtggagccactggcaggctatgctgttacgacgatggatacggatgtccagttggtagatcatcagctggtgacgattacggttgtcaatcagaaattaccacgtggcaatgttgactttatgaaggtggatggtaggaccaatacctctcttcaaggggcaatgttcaaagtcatgaaagaagaaaacggacactatactcctgttcttcaaaatggtaaggaagtagttgtggcatcagggaaagatggtcgtttccgagtggaaggtctagagtatgggacatactatttatgggagctccaagctccaactggttatgttcaattaacatcgcctgtttcctttacaatcgggaaagatactcgtaaggaactggtaacagtggttaaaaataacaagcgaccacggattgatgtgccagatacaggggaagaaaccttgtatatcttgatgcttgttgccattttgttgtttggtagtggctattatcttacgaaaaaaacaaataactgatattcaatgtacatcattatgaaaaagatagcaggctgaagggaagaccagagtactctgaggtgatgttaatcaggaatcatggtgatttggcatgaatcataataacggatatgaggctgggcagattgtgccagcctcattgtgggttattgtttgtaaaacgataggactggtctggtaatcattttaggaatggacaggactgggattctgatttaaaatggatggtgaatcagaaagaaatgagattttctcgtttctcttagcagataggattgtctgttaggaaaagcgataaaatgatgagtttgaagttaaaggaatgctgataaaaaatggcaaaaacaaaaaagcaaaaacgaaacaatctcctattaggagtggtatttttcattggaatagcggtaatggcgtatccgctggtgtctcgcttgtattatcgagtggaatcaaatcaacaaattgctgactttgataaggaaaaagcaacgttggatgaggctgacattgatgaacgaatgaaattggcacaagccttcaatgactctttgaataatgtagtgagtggcgatccttggtcggaagaaatgaagaaaaaagggcgagcagagtatgcacgcatgttagaaatccatgagcggatggggcatgtggaaatccctgctattgatgtagatttgccggtttatgctggtactgctgaagaggtattgcagcaaggcgctggacatctagagggaacttctctaccgatcggaggcaattcgacccatgcggtgattacggcacatacaggtttgccaacggctaagatgtttacggatttgaccaaacttaaagttggggataagttttatgtgcacaatatcaaggaagtgatggcctatcaagtggatcaagtaaaggtgattgagccgacgaactttgatgatttattgattgtaccaggtcatgattatgtgaccttgctgacctgtacgccatacatgatcaatacccatcgtctattggttcgggggcatcggataccgtacgtagcagaggttgaggaagaatttattgcggcaaacaaactcagtcatctctatcgctacctgttttatgtggcagttggtttgattgtgattcttttatggattattcgacgcttgcgcaagaagaaacggcaatcagaaagagctttgaaagcattgaaggaagctactaaggaagtgaaggtagaggatgagtaagagtagatattcacggaaaaagagcgtgaaaaagaagaaaaatccgttcattcttcttctgatttttttggtggggcttgccgttgcgatgtatcccttggtgtctcgttattattatcgtattgagtcaaacgaggttattaaagagtttgatgagacggtttcccagatggataaggcggaacttgaggagcgttggcgcttggctcaagccttcaatgcgaccttgaaaccatctgaaattcttgatccttttacagagcaagagaaaaagaaaggcgtctcagaatatgccaatatgctaaaggtccatgagcggattggctatgtggaaattcctgcgattgatcaggaaattccgatgtatgtcggaacgagtgaggaaattcttcagaagggcgcaggattgctagagggagcttcgttaccggttggtggtgaaaatacccacacagttgtcactgctcatagaggattaccgacggcagaactgtttagtcaattggataagatgaaaaaaggggatatcttttatcttcacgttttagatcaggtgttggcctaccaagtggatcagatagtgacggtggagccgaatgactttgagcctgtcttgattcaacatggggaagattatgcgaccttgttgacttgtacaccgtatatgattaacagtcatcgtctgttggtacgtgggaagcggattccgtatacggcaccaattgcagagcggaatcgagcggtgagagagcgtgggcaattctggttgtggttattactaggagcgatggcggtcatccttctcttgctgtatcgcgtgtatcgtaatcgacggattgtcaaaggactagaaaagcaattggaggggcgtcatgtcaaggactaaactacgagccttattgggatacttgttgatgttggtagcctgtttgattcctatttattgttttggacagatggtgttgcagtctcttggacaggtgaaaggtcatgctacatttgtgaaatccatgacaactgaaatgtaccaagaacaacagaaccattctctcgcctacaatcaacgcttggcttcgcaaaatcgcattgtagatccttttttggcggagggatatgaggtcaattaccaagtgtctgacgaccctgatgcagtctatggttacttgtctattccaagtttggaaatcatggagccggtttatttgggagcagattatcatcatttagggatgggcttggctcatgtggatggtacaccgctgcctctggatggtacagggattcgctcagtgattgctgggcaccgtgcagagccaagccatgtctttttccgccatttggatcagctaaaagttggagatgctctttattatgataatggccaggaaattgtagaatatcagatgatggacacagagattattttaccgtcggaatgggaaaaattagaatcggttagctctaaaaatatcatgaccttgataacctgcgatccgattcctacctttaataaacgcttattagtgaattttgaacgagtcgctgtttatcaaaaatcagatccacaaacagctgcagttgcgagggttgcttttacgaaagaaggacaatctgtatcgcgtgttgcaacctctcaatggttgtaccgtgggctagtggtactggcatttctgggaatcctgtttgttttgtggaagctagcacgtttactacgagggaaataaaaagaaatgaaaggaaagctaaggctgttcctttttccggctctttgtcaactgt

SEQ ID NO: 691 - DNA, 11405 bp, Streptococcus pneumoniae
ttttcattataaatcttatgggacttttttgatactcaaaaagccctataatctccacagtgggatttacccactacagaaattatagagccagaaaaaacacttttgttcactagcagaaactagagagcagaagtgtttttctgttcagatttacccaaaactgggaaatatggggataagaatagagatggcttaggaagcccctttttgtgtgtagacagtacgatgaacttataacaaatagtgagcctttttagcaatcattgcgacccgtttgtcaaaagcctcttttcggatatctacaattgtctgatagatgagacgctgttggctaacatgcaaatctaaggcaatcgtcaaaaagtgatgtttccctttgggatactgctttttaacgtaaggcaggtattctttcgttgtaataataatcaatggctctgtcaaatgctcctctgaaggaggaggactaattagaatattgtatcctgtaacagaggcaactttgtcagtaaaattccgtaaaataatggactttattaagtttacatctgcttgattatttaaaatgataaaaatcgggatagcaggtagtgaggaaaagatggtttctgtcaagtagagtgagaaaaggtacagccgatgctggtcgataactccttcaatcttctgctcagtcatccactcttgaacaattgctttcgaaatatgatacagtggcttgtcgctttcaatcccataatgttcgtaataattataatagggaactagattttgtaaaccaaacaaaaacgttcttgttaagaaagtcagtgctgttaaaaaagaaagagaattcgaaatgtcatttcctaagatattcttgaacttggatagtagatgctttcctcttgtatgctgaagaatcagttgaatagtatgagtctttttttcttgattccatttgtccttggaaaacgaagaattagcagaacaataaaccaaaaagatataatccagttcttcctgagtaaaagtcatgttggcatgtggctctaagtaagtttggcaatgttccatcaaaatcggatacataaagaggttttttaatttttcaaactctttggactcagggaactcaagtggaaattcccgacgtttccaagtgagtgccactagtatgctaaaatgaacatactcgtcaggtgtgatttctaacagttcatgactgagttgagaattagactgcacaatcatatgtgtgacccaatccatacttccatcattcaaatcataaatctcaataccaaaatgaaactggaggagtgcaattaaaaaacgaatgcgatattcaggaccaactacttgatttttcacaaggtccaaacctactgaacgtagtaacaagccacacttttgtcgtacgcggtagcctgttgcgatggaaatatactctttttgtgtaaattcgttaaagctttgattaccttgtagtagaaagaagcggagtatttttaaaatagttgattggttataaagctgatggaagtaataattcgtttgatgagaatggtgttcgattaattgaacttgttgcgtatctaaattaaatgtcaactcttcctcgaatgtttcttgtaattcctgcaaaatgcttaggagacttttagattgtaatgaagttaaagtagacagttcatctagttcaatagaccgaatatccaataatatatttaaaatggtaattttatctgtaattcttttttcaatgtatttgtttagcatagttaccgaatcttagttgcatatagataattttaattattataatacaaaagaaactaattgtcttgtcaaaaaggttgtggaatttccgactttattgataaaacagcatgtaataaaaggcattttaaagatagtaatgagtattggtggagttttatggcttattttttttattagaaaatatttttttatcaaatattgtcgttctataaaaaaatatgtgataaaaatatctattgtgatggaagttgttttaatttatactaggatagttaatagtaatactatactatactatattgtatacaagtgtgtcattgccaggttgagaagatagctataacgcacttttatacgcttttgctacgtttgttagtgaacggattaactcagtgagataaattttatcagaacataagtaatccgtttcttcgtgtatacagattgaaagtacctatgaatcatagaaggattaacttgttctatgaataatgcttaacagggagacacacatgaaaaaagtaagaaagatatttcagaaggcagttgcaggactgtgctgtatatctcagttgacagctttttcttcgatagttgctttagcagaaacgcctgaaaccagtccagcgataggaaaagtagtgattaaggagacaggcgaaggaggagcgcttctaggagatgccgtctttgagttgaaaaacaatacggatggcacaactgtttcgcaaaggacagaggcgcaaacaggagaagcgatattttcaaacataaaacctgggacatacaccttgacagaagcccaacctccagttggttataaaccctctactaaacaatggactgttgaagttgagaagaatggtcggacgactgtccaaggtgaacaggtagaaaatcgagaagaggctctatctgaccagtatccacaaacagggacttatccagatgttcaaacaccttatcagattattaaggtagatggttcggaaaaaaacggacagcacaaggcgttgaatccgaatccatatgaacgtgtgattccagaaggtacactttcaaagagaatttatcaagtgaataatttggatgataaccaatatggaatcgaattgacggttagtgggaaaacagtgtatgaacgaaaagataagtctgtgccgctggatgtcgttatcttgctcgataactcaaatagtatgagtaacattcgaaacaagaatgctcgacgtgcggaaagagctggtgaggcgacacgttctcttattgataaaattacatctgatccagaaaatagggtagcgcttgtgacttatgcttccactatctttgatgggaccgagtttacagtagaaaaaggggtagcagataaaaacggaaaacgattgaatgattctcttttttggaattatgatcagacgagttttacaaccaataccaaagattatagttatttaaagctgactaatgataagaatgacattgtagaattaaaaaataaggtacctaccgaggcagaagatcatgatggaaatagattgatgtaccaattcggtgccacttttactcagaaagctttgatgaaggcagatgagattttgacacaacaagcgagacaaaatagtcaaaaagtcattttccatattacggatggtgtcccaactatgtcgtatccgattaattttaatcatgctacgtttgctccatcatatcaaaatcaactaaatgcattttttagtaaatctcctaataaagatggaatactattaagtgattttattacgcaagcaactagtggagaacatacaattgtacgcggagatgggcaaagttaccagatgtttacagataagacagtttatgaaaaaggtgctcctgcagctttcccagttaaacctgaaaaatattctgaaatgaaggcggttggttatgcagttataggcgatccaattaatggtggatatatttggcttaattggagagagagtattctggcttatccgtttaattctaatactgctaaaattaccaatcatggtgcccctacaagatggtactataacgggaatattgctcctgatgggtatgatgtctttacggtaggtattggtattaacggagatcctggtacggatgaagcaacggctactagttttatgcaaagtatttctagtaaacctgaaaactataccaatgttactgacacgacaaaaatattggaacagttgaatcgttatttccacaccatcgtaactgaaaagaaatcaattgagaatggtacgattacagatccgatgggtgagttaattgatttgcaattgggcacagatggaagatttgatccagcagattacactttaactgcaaacgatggtagtcgcttggagaatggacaagctgtaggtggtccacaaaatgatggtggcttgctaaaaaatgcaaaagtgttctatgatacgactgagaaaaggattcgtgtaacaggtttgtaccttggaacgggtgaaaaagttacattgacttataatgttcgcttgaatgaccaatttgtaagcaataaattctatgacacgaatggtcgaacaaccctacaccctaaggaagtagaaaagaacacagtgcgcgacttcccgattcctaagattcgtgatgtgcgaaaatatccagcaattacgattgcaaaagagaaaaaacttggtgaaattgagtttattaagatcaataagaatgataaaaaaccactgagagatgcggtctttagtcttcaaaaacaacatccggattatccagatatttatggagctattgatcaaaatggcacttatcaaaatgtgagaacaggtgaagatggtaagttgacctttaaaaatctgtcagatgggaaatatcgattatttgaaaattctgaaccagctggttataaacccgttcaaaataagcctatcgttgccttccaaatagtaaatggagaagtcagagatgtgacttcaatcgttccacaagatataccagcgggttacgagtttacgaatgataagcactatattaccaatgaacctattcctccaaagagagaatatcctcgaactggtggtatcggaatgttgccattctatctgataggttgcatgatgatgggaggagttctattatacacacggaaacatccgtaaagtgtagaaatgataatatctatgttctgaacaatacttttaagaagtagcactcaagaagagatttaagtttacttggtgaaaccagttttcttcgccaagtaaaccaccattgaaaggggagatgttttcgaaaacttgcacagaaaaaggattattattgtcatgtgtaattcattacattgctcacagttgattttaagagataaataaggagaaatcatgaaatcaatcaacaaatttttaacaatgcttgctgccttattattgacagcgagtagcctgttttcagctgcaacagtttttgcggctgggacgacaacaacatctgttaccgttcataaactattggcaacagatggggatatggataaaattgcaaatgagttagaaacaggtaactatgctggtaataaagtgggtgttctacctgcaaatgcaaaagaaattgccggtgttatgttcgtttggacaaatactaataatgaaattattgatgaaaatggccaaactctaggagtgaatattgatccacaaacatttaaactctcaggggcaatgccggcaactgcaatgaaaaaattaacagaagctgaaggagctaaatttaacacggcaaatttaccagctgctaagtataaaatttatgaaattcacagtttatcaacttatgtcggtgaagatggagcaaccttaacaggttctaaagcagttccaattgaaattgaattaccattgaacgatgttgtggatgcgcatgtgtatccaaaaaatacagaagcaaagccaaaaattgataaagatttcaaaggtaaagcaaatccagatacaccacgtgtagataaagatacacctgtgaaccaccaagttggagatgttgtagagtacgaaattgttacaaaaattccagcacttgctaattatgcaacagcaaactggagcgatagaatgactgaaggtttggcattcaacaaaggtacagtgaaagtaactgttgatgatgttgcacttgaagcaggtgattatgctctaacagaagtagcaactggttttgatttgaaattaacagatgctggtttagctaaagtgaatgaccaaaacgctgaaaaaactgtgaaaatcacttattcggcaacattgaatgacaaagcaattgtagaagtaccagaatctaatgatgtaacatttaactatggtaataatccagatcacgggaatactccaaagccgaataagccaaatgaaaacggcgatttgacattgaccaagacatgggttgatgctacaggtgcaccaattccggctggagctgaagcaacgttcgatttggttaatgctcagactggtaaagttgtacaaactgtaactttgacaacagacaaaaatacagttactgttaacggattggataaaaatacagaatataaattcgttgaacgtagtataaaagggtattcagcagattatcaagaaatcactacagctggagaaattgctgtcaagaactggaaagacgaaaatccaaaaccacttgatccaacagagccaaaagttgttacatatggtaaaaagtttgtcaaagttaatgataaagataatcgtttagctggggcagaatttgtaattgcaaatgctgataatgctggtcaatatttagcacgtaaagcagataaagtgagtcaagaagagaagcagttggttgttacaacaaaggatgctttagatagagcagttgctgcttataacgctcttactgcacaacaacaaactcagcaagaaaaagagaaagttgacaaagctcaagctgcttataatgctgctgtgattgctgccaacaatgcatttgaatgggtggcagataaggacaatgaaaatgttgtgaaattagtttctgatgcacaaggtcgctttgaaattacaggccttcttgcaggtacatattacttagaagaaacaaaacagcctgctggttatgcattactaactagccgtcagaaatttgaagtcactgcaacttcttattcagcgactggacaaggcattgagtatactgctggttcaggtaaagatgacgctacaaaagtagtcaacaaaaaaatcacgatcccacaaacgggtggtattggtacaattatctttgctgtagcaggggctgtgattatgggtattgcagtgtacgcatatgttaaaaacaacaaagatgaggatcaacttgcttaagtaagagagaaaggagccattgatgacaatgcagaaaatgcagaaaatgattagtcgtatcttctttgttatggctctgtgtttttctcttgtatggggtgcacatgcagtccaagcgcaagaagatcacacgttggtcttgcaattggagaactatcaggaggtggttagtcaattgccatctcgtgatggtcatcggttgcaggtatggaagttggatgattcgtattcctatgataatcgggtgcaaattgtgagagacttgcattcgtgggatgagaataaactttcttctttcaaaaagacttcgtttgagatgaccttccttgagaatcagattgaagtatctcatattccaaatggtctttactatgttcgctctattatccagacggatgcggtttcttatccagctgaatttctttttgaaatgacagatcagacggtagagcctttggtcattgtagcgaaaaaagcagatacggtgacaacaaaggtgaagctgataaaggtggatcaagaccacaatcgcttggagggtgtcggctttaaattggtatcagtagcaagagatggttctgaaaaagaggttcccttgattggagaataccgttacagttcttctggtcaagtagggagaactctctatactgataaaaatggagagattgttgtgacaaatcttcctcttgggacctatcgtttcaaggaggtggagccactggcaggctatactgttacgacgatggatacggatgtccagttggtagatcatcagctggtgacgattacggttgtcaatcagaaattaccacgtggcaatgttgactttatgaaggtggatggtaggaccaatacctctcttcaaggggcaatgttcaaagtcatgaaagaagaaaacggacactatactcctgttcttcaaaatggtaaggaagtagttgtggcatcagggaaagatggtcgtttccgagtggaaggtctagagtatgggacatactatttatgggagctccaagctccaactggttatgttcaattaacatcgcctgtttcctttacaatcgggaaagatactcgtaaggaactggtaacagtggttaaaaataacaagcgaccacggattgatgtgccagatacaggggaagaaaccttgtatatcttgatgcttgttgccattttgttgtttggtagtggctattatcttacgaaaaaaacaaataactgatattcaatgtacatcattatgaaaaagatagcaggctgaagggaagaccagagtactctgaggtgatgttaatcaggaatcatggtgatttggcatgaatcataataacggatatgaggctgggcagattgtgccagcctcattgtgggttattgtttgtaaaacgataggactggtctggtaatcattttaggaatggacaggactgggattctgatttaaaatggatggtgaatcagaaagaaatgagattttctcgtttctcttagcagataggattgtctgttaggaaaagcgataaaatgatgagtttgaagttaaaggaatgctgataaaaaatggcaaaaacaaaaaagcaaaaacgaaacaatctcctattaggagtggtatttttcattggaatggcggtaatggcgtatccgctggtgtctcgcttgtattatcgagtggaatcaaatcaacaaattgctgactttgataaggaaaaagcaacgttggatgaggctgacattgatgaacgaatgaaattggcacaagccttcaatgactctttgaataatgtagtgagtggcgatccttggtcggaagaaatgaagaaaaaagggcgagcagagtatgcacgcatgttagaaatccatgagcggatggggcatgtggaaatccctgctattgatgtagatttgccggtttatgctggtactgctgaagaggtattgcagcaaggcgctggacatctagagggaacttctctaccgatcggaggcaattcgacccatgcggtgattacggcacatacaggtttgccaacggctaagatgtttacggatttgaccaaacttaaagttggggataagttttatgtgcacaatatcaaggaagtgatggcctatcaagtggatcaagtaaaggtgattgagccgacgaactttgatgatttattgattgtaccaggtcatgattatgtgaccttgctgacctgtacgccatacatgatcaatacccatcgtctattggttcgggggcatcggataccgtacgtagcagaggttgaggaagaatttattgcggcaaacaaactcagtcatctctatcgctacctgttttatgtggcagttggtttgattgtgattcttttatggattattcgacgcttgcgcaagaagaaacggcaatcagaaagagctttgaaagcattgaaggaagctactaaggaagtgaaggtagaggatgagtaagagtagatattcacggaaaaagagcgtgaaaaagaagaaaaatccgttcattcttcttctgatttttttggtggggcttgccgttgcgatgtatcccttggtgtctcgttattattatcgtattgagtcaaacgaggttattaaagagtttgatgagacggtttcccagatggataaggcggaacttgaggagcgttggcgcttggctcaagccttcaatgcgaccttgaaaccatctgaaatcctcgatccttttacagatcaggaaaagaaacagggagtttcagaatatgctaacatgctaaaagttcatgagcgtatcggatatgtagaaattcctgcgattgaacaggaaatccccatgtatgttggcacaagtgaagacattcttcagaaaggggcagggctgttagaaggggcttcgctgcctgttggaggtgaaaatacccatacagtgatcactgctcacagaggattgccaacggcagaattgttcagtcaattggataagatgaagaaaggggatatcttttatcttcacgttttagaccaggttttggcctatcaagtggatcagatagtgacggtggagccgaatgattttgagcctgttctgattcaacatggacaagattatgcgactttactgacttgtacgccatacatgattaacagccaccgtttgttggtacgtgggaaacggattccatatacagcgccgattgctgagcggaatcgagcggtgagagagcgtgggcaattctggttgtggttattactaggagcgatggcggtcatccttctcttgctgtatcgcgtgtatcgtaatcgacggattgtcaaaggactagaaaagcaattggaggggcgtcatgtcaaggactaaactacgagccttattgggatacttgttgatgttggtagcctgtttgattcctatttattgttttggacagatggtgttgcagtctcttggacaggtgaaaggtcatgctacatttgtgaaatccatgacaactgaaatgtaccaagaacaacagaaccattctctcgcctacaatcaacgcttggcttcgcaaaatcgcattgtagatccttttttggcggagggatatgaggtcaattaccaagtgtctgacgaccctgatgcagtctatggttacttgtctattccaagtttggaaatcatggagccggtttatttgggagcagattatcatcatttagggatgggcttggctcatgtggatggtacaccgctgcctctggatggtacagggattcgctcagtgattgctgggcaccgtgcagagccaagccatgtctttttccgccatttggatcagctaaaagttggagatgctctttattatgataatggccaggaaattgtagaatatcagatgatggacacagagattattttaccgtcggaatgggaaaaattagaatcggttagctctaaaaatatcatgaccttgataacctgcgatccgattcctacctttaataaacgcttattagtgaattttgaacgagtcgctgtttatcaaaaatcagatccacaaacagctgcagttgcgagggttgcttttacgaaagaaggacaatctgtatcgcgtgttgcaacctctcaatggttgtaccgtgggctagtggtactggcatttctgggaatcctgtttgttttgtggaagctagcacgtttactacgagggaaataaaaagaaatgaaaggaaagctaaggctgttcctttttccggctctttgtcaactgtagt

SEQ ID NO: 692 - DNA, 11327 bp, Streptococcus pneumoniae
tttaggcgcttttcattataagtcttatgggacttttttgatactcaaaaagccctataatctccacagtgggatttacccactacagaaattatagagccagaaaaaacacttttgttcactagcagaaactagagagcagaagtgtttttctgttcagatttacccaaaactgggaaatatggggataagaatagagatggcttaggaagcccctttttgtgtgtagacagtacgatgaacttataacaaatagtgagcctttttagcaatcattgcgacccgtttgtcaaaagcctcttttcggatatctacaattgtctgatagatgagacgctgttggctaacatgcaaatctaaggcaatcgtcaaaaagtgatgtttccctttgggatactgctttttaacgtaaggcaggtattctttcgttgtaataataatcaatggctctgtcaaatgctcctctgaaggaggaggactaattagaatattgtatcctgtaacagaggcaactttgtcagtaaaattccgtaaaataatggactttattaagtttacatctgcttgattatttaaaatgataaaaatcgggatagcaggtagtgaggaaaagatggtttctgtcaagtagagtgagaaaaggtacagccgatgctggtcgataactccttcaatcttctgctcagtcatccactcttgaacaattgctttcgaaatatgatacagtggcttgtcgctttcaatcccataatgttcgtaataattataatagggaactagattttgtaaaccaaacaaaaacgttcttgttaagaaagtcagtgctgttaaaaaagaaagagaattcgaaatgtcatttcctaagatattcttgaacttggatagtagatgctttcctcttgtatgctgaagaatcagttgaatagtatgagtctttttttcttgattccatttgtccttggaaaacgaagaattagcagaacaataaaccaaaaagatataatccagttcttcctgagtaaaagtcatgttggcatgtggctctaagtaagtttggcaatgttccatcaaaatcggatacataaagaggttttttaatttttcaaactctttggactcagggaactcaagtggaaattcccgacgtttccaagtgagtgccactagtatgctaaaatgaacatactcgtcaggtgtgatttctaacagttcatgactgagttgagaattagactgcacaatcatatgtgtgacccaatccatacttccatcattcaaatcataaatctcaataccaaaatgaaactggaggagtgcaattaaaaaacgaatgcgatattcaggaccaactacttgattttcacaaggtccaaacctactgaacgtagtaacaagccacacttttgtcgtacgcggtagcctgttgcgatggaaatatactctttttgtgtaaattcgttaaagctttgattaccttgtagtagaaagaagcggagtatttttaaaatagttgattggttataaagctgatggaagtaataattcgtttgatgagaatggtgttcgattaattgaacttgttgcgtatctaaattaaatgtcaactcttcctcgaatgtttcttgtaattcctgcaaaatgcttaggagacttttagattgtaatgaagttaaagtagacagttcatctagttcaatagaccgaatatccaataatatatttaaaatggtaattttatctgtaattcttttttcaatgtatttgtttagcatagttaccgaatcttagttgcatatagataattttaattattataatacaaaagaaactaattgtcttgtcaaaaaggttgtggaatttccgactttattgataaaacagcatgtaataaaaggcattttaaagatagtaatgagtattggtggagttttatggcttattttttttattagaaaatattttttatcaaatattgtcgttctataaaaaaatatgtgataaaaatatctattgtgatggaagttgttttaatttatactaggatagttaatagtaatactatactatactatattgtatacaagtgtgtcattgccaggttgagaagatagctataacgcacttttatacgcttttgctacgtttgttagtgaacggattaactcagtgagataaattttatcagaacataagtaatccgtttcttcgtgtatacagattgaaagtacctatgaatcatagaaggattaacttgttctatgaataatgcttaacagggagacacacatgaaaaaagtaagaaagatatttcagaaggcagttgcaggactgtgctgtatatctcagttgacagctttttcttcgatagttgctttagcagaaacgcctgaaaccagtccagcgataggaaaagtagtgattaaggagacaggcgaaggaggagcgcttctaggagatgccgtctttgagttgaaaaacaatacgaatggcacaactgtttcgcaaaggacagaggcgcaaacaggagaagcgatattttcaaacataaaacctgggacatacaccttgacagaagcccaacctccagttggttataaaccctctactaaacaacggactgttgaagttgagaagaatggtcggacgactgtccaaggtgaacaggtagaaaatcgagaagaggctctatctgaccagtatccacaaacagggacttatccagatgttcaaacaccttatcagattattaaggtagatggttcggaaaaaaacggacagcacaaggcgttgaatccgaatccatatgaacgtgtgattccagaaggtacactttcaaagagaatttatcaagtgaataatttggatgataaccaatatggaatcgaattgacggttagtgggaaaacagtgtatgaacgaaaagataagtctgtgccgctggatgtcgttatcttgctcgataactcaaatagtatgagtaacattcgaaacaagaatgctcgacgtgcggaaagagctggtgaggcgacacgttctcttattgataaaattacatctgatccagaaaatagggtagcgcttgtgacttatgcttccactatctttgatgggaccgagtttacagtagaaaaaggggtagcagataaaaacggaaaacgattgaatgattctcttttttggaattatgatcagacgagttttacaaccaataccaaagattatagttatttaaagctgactaatgataagaatgacattgtagaattaaaaaataaggtacctaccgaggcagaagaccatgatggaaatagattgatgtaccaattcggtgccacttttactcagaaagctttgatgaaggccgatgagattttgacacaacaagcgagacaaaatagtcaaaaagtcattttccatattacggatggtgtcccaactatgtcgtatccgattaattttaatcatgctacgtttgctccatcatatcaaaatcaactaaatgtattttttagtaaatctcctaataaagatggaatactattaagtgattttattacgcaagcaactagtggagaacatacaattgtacgcggagatgggcaaagttaccagatgtttacagataagacagtttatgaaaaaggtgctcctgcagctttcccagttaaacctgaaaaatattctgaaatgaaggcggttggttatgcagttataggcgatccaattaatggtggatatatttggcttaattggagagagagtattctggcttatccgtttaattctaatactgctaaaattaccaatcatggtgaccctacaagatggtactataacgggaatattgctcctgatgggtatgatgtctttacggtaggtattggtattaacggagatcctggtacggatgaagcaacggctactagttttatgcaaagtatttctagtaaacctgaaaactataccaatgttactgacacgacaaaaatattggaacagttgaatcgttatttccacaccatcgtaactgaaaagaaatcaattgagaatggtacgattacagatccgatgggtgagttaattgatttgcaattgggcacagatggaagatttgatccagcagattacactttaactgcaaacgatggtagtcgcttggagaatggacaagctgtaggtggtccacaaaatgatggtggcttgctaaaaaatgcaaaagtgttctatgatacgactgagaaaaggattcgtgtaacaggtttgtaccttggaacgggtgaaaaagttacattgacttataatgttcgcttgaatgaccaatttgtaagcaataaattctatgacacgaatggtcgaacaaccctacaccctaaggaagtagaaaagaacacagtgcgcgacttcccgattcctaagattcgtgatgtgcgaaaatatccagcaattacgattgcaaaagagaaaaaacttggtgaaattgagtttattaagatcaataagaatgataaaaaaccactgagagatgcggtctttagtcttcaaaaacaacatccggattatccagatatttatggagctattgatcaaaatggcacttatcaaaatgtgagaacaggtgaagatggtaagttgacctttaaaaatctgtcagatgggaaatatcgattatttgaaaattctgaaccagctggttataaacccgttcaaaataagcctatcgttgccttccaaatagtaaatggagaagtcagagatgtgacttcaatcgttccacaagatataccagcgggttacgagtttacgaatgataagcactatattaccaatgaacctattcctccaaagagagaatatcctcgaactggtggtatcggaatgttgctattctatctgataggttgcatgatgatgggaggagttctattatacacacggaaacatccgtaaagtgtagaaatgataatatctatgttctgaacgatacttttaagaagtagcactcaagaagagatttaagtttacttggtgaaaccagttttcttcgccaagtaaaccaccattgaaaggggagatgttttcgaaaacttgcacagaaaaaggattattattgtcatgtgtaattcattacattgctcacagttgattttaagagataaataaggagaaatcatgaaatcaatcaacaaatttttaacaatgcttgctgccttattactgacagcgagtagcctgttttcagctgcaacagtttttgcggctgggacgacaacaacatctgttaccgttcataaactattggcaacagatggggatatggataaaattgcaaatgagttagaaacaggtaactatgctggtaataaagtgggtgttctacctgcaaatgcaaaagaaattgccggtgttatgttcgtttggacaaatactaataatgaaattattgatgaaaatggccaaactctaggagtgaatattgatccacaaacatttaaactctcaggggcaatgccggcaactgcaatgaaaaaattaacagaagctgaaggagctaaatttaacacggcaaatttaccagctgctaagtataaaatttatgaaattcacagtttatcaacttatgtcggtgaagatggagcaaccttaacaggttctaaagcagttccaattgaaattgaattaccattgaacgatgttgtggatgcgcatgtgtatccaaaaaatacagaagcaaagccaaaaattgataaagatttcaaaggtaaagcaaatccagatacaccacgtgtagataaagatacacctgtgaaccaccaagttggagatgttgtagagtacgaaattgttacaaaaattccagcacttgctaattatgcaacagcaaactggagcgatagaatgactgaaggtttggcattcaacaaaggtacagtgaaagtaactgttgatgatgttgcacttgaagcaggtgattatgctctaacagaagtagcaactggttttgatttgaaattaacagatgctggtttagctaaagtgaatgaccaaaacgctgaaaaaactgtgaaaatcacttattcggcaacattgaatgacaaagcaattgtagaagtaccagaatctaatgatgtaacatttaactatggtaataatccagatcacgggaatactccaaagccgaataagccaaatgaaaacggcgatttgacattgaccaagacatgggttgatgctacaggtgcaccaattccggctggagctgaagcaacgttcgatttggttaatgctcagactggtaaagttgtacaaactgtaactttgacaacagacaaaaatacagttactgttaacggattggataaaaatacagaatataaattcgttgaacgtagtataaaagggtattcagcagattatcaagaaatcactacagctggagaaattgctgtcaagaactggaaagacgaaaatccaaaaccacttgatccaacagagccaaaagttgttacatatggtaaaaagtttgtcaaagttaatgataaagataatcgtttagctggggcagaatttgtaattgcaaatgctgataatgctggtcaatatttagcacgtaaagcagataaagtgagtcaagaagagaagcagttggttgttacaacaaaggatgctttagatagagcagttgctgcttataacgctcttactgcacaacaacaaactcagcaagaaaaagagaaagttgacaaagctcaagctgcttataatgctgctgtgattgctgccaacaatgcatttgaatgggtggcagataaggacaatgaaaatgttgtgaaattagtttctgatgcacaaggtcgctttgaaattacaggccttcttgcaggtacatattacttagaagaaacaaaacagcctgctggttatgcattactaactagtcgtcagaaatttgaagtcactgcaacttcttattcagcgactggacaaggcattgagtatactgctggttcaggtaaagatgacgctacaaaagtagtcaacaaaaaaatcacgatcccacaaacgggtggtattggtacaattatctttgctgtagcaggggctgtgattatgggtattgcagtgtacgcatatgttaaaaacaacaaagatgaggatcaacttgcttaagtaagagagaaaggagccattgatgacaatgcagaaaatgcagaaaatgcagaaaatgcagaaaatgcagaaaatgcagaaaatgattagtcgtatcttctttgttatggctctgtgtttttctcttgtatggggtgcacatgcagtccaagcgcaagaagatcacacgttggtcttgcaattggagaactatcaggaggtggttagtcaattgccatctcgtgatggtcatcggttgcaggtatggaagttggatgattcgtattcctatgataatcgggtgcaaattgtgagagacttgcattcgtgggatgagaataaactttcttctttcaaaaagacttcgtttgagatgaccttccttgagaatcagattgaagtatctcatattccaaatggtctttactatgttcgctctattatccagacggatgcggtttcttatccagctgaatttctttttgaaatgacagatcagacggtagagcctttggtcattgtagcgaaaaaagcagatacggtgacaacaaaggtgaagctgataaaggtggatcaagaccacaatcgcttggagggtgtcggctttaaattggtatcagtagcaagagatggttctgaaaaagaggttcccttgattggagaataccgttacagttcttctggtcaagtagggagaactctctatactgataaaaatggagagattgttgtgacaaatcttcctcttgggacctatcgtttcaaggaggtggagccactggcaggctatactgttacgacgatggatacggatgtccagttggtagatcatcagctggtgacgattacggttgtcaatcagaaattaccacgtggcaatgttgactttatgaaggtggatggtaggaccaatacctctcttcaaggggcaatgttcaaagtcatgaaagaagaaaacggacactatactcctgttcttcaaaatggtaaggaagtagttgtggcatcagggaaagatggtcgtttccgagtggaaggtctagagtatgggacatactatttatgggagctccaagctccaactggttatgttcaattaacatcgcctgtttcctttacaatcgggaaagatactcgtaaggaactggtaacagtggttaaaaataacaagcgaccacggattgatgtgccagatacaggggaagaaaccttgtatatcttgatgcttgttgccattttgttgtttggtagtggctattatcttacgaaaaaaacaaataactgatattcaatgtacatcattatgaaaaagatagcaggctgaagggaagaccagagtactctgaggtgatgttaatcaggaatcatggtgatttggcatgaatcataataacggatatgaggctgggcagattgtgccagcctcattgtgggttattgtttgtaaaacgataggactggtctggtaatcattttaggaatggacaggactgggattctgatttaaaatggatggtgaatcagaaagaaatgagattttctcgtttctcttagcagataggattgtctgttaggaaaagcgataaaatgatgagtttgaagttaaaggaatgctgataaaaaatggcaaaaacaaaaaagcaaaaacgaaacaatctcctattaggagtggtatttttcattggaatagcggtaatggcgtatccgctggtgtctcgcttgtattatcgagtggaatcaaatcaacaaattgctgactttgataaggaaaaagcaacgttggatgaggctgacattgatgaacgaatgaaattggcacaagccttcaatgactctttgaataatgtagtgagtggcgatccttggtcggaagaaatgaagaaaaaagggcgagcagagtatgcacgcatgttagaaatccatgagcggatggggcatgtggaaatccctgctattgatgtagatttgccggtttatgctggtactgctgaagaggtattgcagcaaggcgctggacatctagagggaacttctctaccgatcggaggcaattcgacccatgcggtgattacggcacatacaggtttgccaacggctaagatgtttacggatttgaccaaacttaaagttggggataagttttatgtgcacaatatcaaggaagtgatggcctatcaagtggatcaagtaaaggtgattgagccgacgaactttgatgatttattgattgtaccaggtcatgattatgtgaccttgctgacctgtacgccatacatgatcaatacccatcgtctattggttcgggggcatcggataccgtacgtagcagaggttgaggaagaatttattgcggcaaacaaactcagtcatctctatcgctacctgttttatgtggcagttggtttgattgtgattcttttatggattattcgacgcttgcgcaagaagaaacggcaatcagaaagagctttgaaagcattgaaggaagctactaaggaagtgaaggtagaggatgagtaagagtagatattcacggaaaaagagcgtgaaaaagaagaaaaatccgttcattcttcttctgatttttttggtggggcttgccgttgcgatgtatcccttggtgtctcgttattattatcgtattgagtcaaacgaggttattaaagagtttgatgagacggtttcccagatggataaggcggaacttgaggagcgttggcgcttggctcaagccttcaatgcgaccttgaaaccatctgaaattcttgatccttttacagagcaagagaaaaagaaaggcgtctcagaatatgccaatatgctaaaggtccatgagcggattggctatgtggaaattcctgcgattgatcaggaaattccgatgtatgtcggaacgagtgaggaaattcttcagaagggcgcaggattgctagagggagcttcgttaccggttggtggtgaaaatacccacacagttgtcactgctcatagaggattaccgacggcagaactgtttagtcaattggataagatgaaaaaaggggatatcttttatcttcacgttttagatcaggtgttggcctaccaagtggatcagatagtgacggtggagccgaatgactttgagcctgtcttgattcaacatggggaagattatgcgaccttgttgacttgtacaccgtatatgattaacagtcatcgtctgttggtacgtgggaagcggattccgtatacggcaccaattgcagagcggaatcgagcggtgagagagcgtgggcaattctggttgtggttattactaggagcgatggcggtcatccttctcttgctgtatcgcgtgtatcgtaatcgacggattgtcaaaggactagaaaagcaattggaggggcgtcatgtcaaggactaaactacgagccttattgggatacttgttgatgttggtagcctgtttgattcctatttattgttttggacagatggtgttgcagtctcttggacaggtgaaaggtcatgctacatttgtgaaatccatgacaactgaaatgtaccaagaacaacagaaccattctctcgcctacaatcaacgcttggcttcgcaaaatcgcattgtagatccttttttggcggagggatatgaggtcaattaccaagtgtctgacgaccctgatgcagtctatggttacttgtctattccaagtttggaaatcatggagccggtttatttgggagcagattatcatcatttagggatgggcttggctcatgtggatggtacaccgctgcctctggatggtacagggattcgctcagtgattgctgggcaccgtgcagagccaagccatgtctttttccgccatttggatcagctaaaagttggagatgctctttattatgataatggccaggaaattgtagaatatcagatgatggacacagagattattttaccgtcggaatgggaaaaattagaatcggttagctctaaaaatatcatgaccttgataggacaatctgtatcgcgtgttgcaacctctcaatggttgtaccgtgggctagtggtactggcatttctgggaatcctgtttgttttgtggaagctagcacgtttactacgagggaaataaaaagaaatgaaaggaaagctaaggctgttcctttttccggctctttgtcaactgtag

SEQ ID NO: 693 - DNA, 11360 bp, Streptococcus pneumoniae
ttaggcgcttttcattataagtcttatgggacttttttgatactcaaaaagccctataatctccacagtgggatttacccactacagaaattatagagccagaaaaaacacttttgttcactagcagaaactagagagcagaagtgtttttctgttcagatttacccaaaactgggaaatatggggataagaatagagatggcttaggaagcccctttttgtgtgtagacagtacgatgaacttataacaaatagtgagcctttttagcaatcattgcgacccgtttgtcaaaagcctcttttcggatatctacaattgtctgatagatgagacgctgttggctaacatgcaaatctaaggcaatcgtcaaaaagtgatgtttccctttgggatactgctttttaacgtaaggcaggtattctttcgttgtaataataatcaatggctctgtcaaatgctcctctgaaggaggaggactaattagaatattgtatcctgtaacagaggcaactttgtcagtaaaattccgtaaaataatggactttattaagtttacatctgcttgattatttaaaatgataaaaatcgggatagcaggtagtgaggaaaagatggtttctgtcaagtagagtgagaaaaggtacagccgatgctggtcgataactccttcaatcttctgctcagtcatccactcttgaacaattgctttcgaaatatgatacagtggcttgtcgctttcaatcccataatgttcgtaataattataatagggaactagattttgtaaaccaaacaaaaacgttcttgttaagaaagtcagtgctgttaaaaaagaaagagaattcgaaatgtcatttcctaagatattcttgaacttggatagtagatgctttcctcttgtatgctgaagaatcagttgaatagtatgagtctttttttcttgattccatttgtccttggaaaacgaagaattagcagaacaataaaccaaaaagatataatccagttcttcctgagtaaaagtcatgttggcatgtggctctaagtaagtttggcaatgttccatcaaaatcggatacataaagaggttttttaatttttcaaactctttggactcagggaactcaagtggaaattcccgacgtttccaagtgagtgccactagtatgctaaaatgaacatactcgtcaggtgtgatttctaacagttcatgactgagttgagaattagactgcacaatcatatgtgtgacccaatccatacttccatcattcaaatcataaatctcaataccaaaatgaaactggaggagtgcaattaaaaaacgaatgcgatattcaggaccaactacttgatttttcacaaggtccaaacctactgaacgtagtaacaagccacacttttgtcgtacgcggtagcctgttgcgatggaaatatactctttttgtgtaaattcgttaaagctttgattaccttgtagtagaaagaagcggagtatttttaaaatagttgattggttataaagctgatggaagtaataattcgtttgatgagaatggtgttcgattaattgaacttgttgcgtatctaaattaaatgtcaactcttcctcgaatgtttcttgtaattcctgcaaaatgcttaggagacttttagattgtaatgaagttaaagtagacagttcatctagttcaatagaccgaatatccaataatatatttaaaatggtaattttatctgtaattcttttttcaatgtatttgtttagcatagttaccgaatcttagttgcatatagataattttaattattataatacaaaagaaactaattgtcttgtcaaaaaggttgtggaatttccgactttattgataaaacagcatgtaataaaaggcattttaaagatagtaatgagtattggtggagttttatggcttattttttttattagaaaatatttttttatcaaatattgtcgttctataaaaaaatatgtgataaaaatatctattgtgatggaagttgttttaatttatactaggatagttaatagtaatactatactatactatattgtatacaagtgtgtcattgccaggttgagaagatagctataacgcacttttatacgcttttgctacgtttgttagtgaacggattaactcagtgagataaattttatcagaacataagtaatccgtttcttcgtgtatacagattgaaagtacctatgaatcatagaaggattaacttgttctatgaataatgcttaacagggagacacacatgaaaaaagtaagaaagatatttcagaaggcagttgcaggactgtgctgtatatctcagttgacagctttttcttcgatagttgctttagcagaaacgcctgaaaccagtccagcgataggaaaagtagtgattaaggagacaggcgaaggaggagcgcttctaggagatgccgtctttgagttgaaaaacaatacggatggcacaactgtttcgcaaaggacagaggcgcaaacaggagaagcgatattttcaaacataaaacctgggacatacaccttgacagaagcccaacctccagttggttataaaccctctactaaacaatggactgttgaagttgagaagaatggtcggacgactgtccaaggtgaacaggtagaaaatcgagaagaggctctatctgaccagtatccacaaacagggacttatccagatgttcaaacaccttatcagattattaaggtagatggttcggaaaaaaacggacagcacaaggcgttgaatccgaatccatatgaacgtgtgattccagaaggtacactttcaaagagaatttatcaagtgaataatttggatgataaccaatatggaatcgaattgacggttagtgggaaaacagtgtatgaacaaaaagataagtctgtgccgctggatgtcgttatcttgctcgataactcaaatagtatgagtaacattcgaaacaagaatgctcgacgtgcggaaagagctggtgaggcgacacgttctcttattgataaaattacatctgattcagaaaatagggtagcgcttgtgacttatgcttccactatctttgatgggaccgagtttacagtagaaaaaggggtagcagataaaaacggaaagcgattgaatgattctcttttttggaattatgatcagacgagttttacaaccaataccaaagattatagttatttaaagctgactaatgataagaatgacattgtagaattaaaaaataaggtacctaccgaggcagaagaccatgatggaaatagattgatgtaccaattcggtgccacttttactcagaaagctttgatgaaggcagatgagattttgacacaacaagcgagacaaaatagtcaaaaagtcattttccatattacggatggtgtcccaactatgtcgtatccgattaattttaatcatgctacgtttgctccatcatatcaaaatcaactaaatgcattttttagtaaatctcctaataaagatggaatactattaagtgattttattacgcaagcaactagtggagaacatacaattgtacgcggagatgggcaaagttaccagatgtttacagataagacagtttatgaaaaaggtgctcctgcagctttcccagttaaacctgaaaaatattctgaaatgaaggcggctggttatgcagttataggcgatccaattaatggtggatatatttggcttaattggagagagagtattctggcttatccgtttaattctaatactgctaaaattaccaatcatggtgaccctacaagatggtactataacgggaatattgctcctgatgggtatgatgtctttacggtaggtattggtattaacggagatcctggtacggatgaagcaacggctactagttttatgcaaagtatttctagtaaacctgaaaactataccaatgttactgacacgacaaaaatattggaacagttgaatcgttatttccacaccatcgtaactgaaaagaaatcaattgagaatggtacgattacagatccgatgggtgagttaattgatttgcaattgggcacagatggaagatttgatccagcagattacactttaactgcaaacgatggtagtcgcttggagaatggacaagctgtaggtggtccacaaaatgatggtggtttgttaaaaaatgcaaaagtgctctatgatacgactgagaaaaggattcgtgtaacaggtctgtaccttggaacggatgaaaaagttacgttgacctacaatgttcgtttgaatgatgagtttgtaagcaataaattttatgataccaatggtcgaacaaccttacatcctaaggaagtagaacagaacacagtgcgcgacttcccgattcctaagattcgtgatgtgcggaagtatccagaaatcacaatttcaaaagagaaaaaacttggtgacattgagtttattaaggtcaataaaaatgataaaaaaccactgagaggtgcggtctttagtcttcaaaaacaacatccggattatccagatatttatggagctattgatcaaaatggcacttatcaaaatgtgagaacaggtgaagatggtaagttgacctttaaaaatctgtcagatgggaaatatcgattatttgaaaattctgaaccagctggttataaacccgttcaaaataagcctatcgttgccttccaaatagtaaatggagaagtcagagatgtgacttcaatcgttccacaagatataccagcgggttacgagtttacgaatgataagcactatattaccaatgaacctattcctccaaagagagaatatcctcgaactggtggtatcggaatgttgccattctatctgataggttgcatgatgatgggaggagttctattatacacacggaaacatccgtaaagtgtagaaatgataatatctatgttctgaacgatacttttaagaagtagcactcaagaagagatttaagtttacttggtgaaacctgttttattcgtaagtaaactatcattgaaaggggagatgttttcgaaaacttgcacagaaaaaggattattattgtcatgtgtaattcattacattgctcacagttgattttaagagatatgaataaggagaaatcatgaaatcaatcaacaaatttttaacaatgcttgctgccttattactgacagcgagtagcctgttttcagctgcaacagtttttgcggctgggacgacaacaacatctgttaccgttcataaactattggcaacagatggggatatggataaaattgcaaatgagttagaaacaggtaactatgctggtaataaagtgggtgttctacctgcaaatgcaaaagaaattgccggtgttatgttcgtttggacaaatactaataatgaaattattgatgaaaatggccaaactctaggagtgaatattgatccacaaacatttaaactctcaggggcaatgccggcaactgcaatgaaaaaattaacagaagctgaaggagctaaatttaacacggcaaatttaccagctgctaagtataaaatttatgaaattcacagtttatcaacttatgtcggtgaagatggagcaaccttaacaggttctaaagcagttccaattgaaattgaattaccattgaacgatgttgtggatgcgcatgtgtatccaaaaaatacagaagcaaagccaaaaattgataaagatttcaaaggtaaagcaaatccagatacaccacgtgtagataaagatacacctgtgaaccaccaagttggagatgttgtagagtacgaaattgttacaaaaattccagcacttgctaattatgcaacagcaaactggagcgatagaatgactgaaggtttggcattcaacaaaggtacagtgaaagtaactgttgatgatgttgcacttgaagcaggtgattatgctctaacagaagtagcaactggttttgatttgaaattaacagatgctggtttagctaaagtgaatgaccaaaacgctgaaaaaactgtgaaaatcacttattcggcaacattgaatgacaaagcaattgtagaagtaccagaatctaatgatgtaacatttaactatggtaataatccagatcacgggaatactccaaagccgaataagccaaatgaaaacggcgatttgacattgaccaagacatgggttgatgctacaggtgcaccaattccggctgtgtaactttgacaacagacaaaaatacagttactgttaacggattggataaaaatacagaatataaattcgttgaacgtagtataaaagggtattcagcagattatcaagaaatcactacagctggagaaattgctgtcaagaactggaaagacgaaaatccaaaaccacttgatccaacagagccaaaagttgttacatatggtaaaaagtttgtcaaagttaatgataaagataatcgtttagctggggcagaatttgtaattgcaaatgctgataatgctggtcaatatttagcacgtaaagcagataaagtgagtcaagaagagaagcagttggttgttacaacaaaggatgctttagatagagcagttgctgcttataacgctcttactgcacaacaacaaactcagcaagaaaaagagaaagttgacaaagctcaagctgcttataatgctgctgtgattgctgccaacaatgcatttgaatgggtggcagataaggacaatgaaaatgttgtgaaattagtttctgatgcacaaggtcgctttgaaattacaggccttcttgcaggtacatattacttagaagaaacaaaacagcctgctggttatgcattactaactagccgtcagaaatttgaagtcactgcaacttcttattcagcgactggacaaggcattgagtatactgctggttcaggtaaagatgacgctacaaaagtagtcaacaaaaaaatcactatcccacaaacgggtggtattggtacaattatctttgctgtagcgggggctgcgattatgggtattgcagtgtacgcatatgttaaaaacaacaaagatgaggatcaacttgcttaagtaagagagaaaggagccattgatgacaatgcagaaaatgcagaaaatgattagtcgtatcttctttgttatggctctgtgtttttctcttgtatggggtgcacatgcagtccaagcgcaagaagatcacacgttggtcttgcaattggagaactatcaggaggtggttagtcaattgccatctcgtgatggtcatcggttgcaagtatggaagttggatgattcgtattcctatgatgatcgggtgcaaattgtaagagacttgcattcgtgggatgagaataaactttcttctttcaaaaagacttcgtttgagatgaccttccttgagaatcagattgaagtatctcatattccaaatggtctttactatgttcgctctattatccagacggatgcggtttcttatccagctgaatttctttttgaaatgacagatcaaacggtagagcctttggtcattgtagcgaaaaaaacagatacaatgacaacaaaggtgaagctgataaaggtggatcaagaccacaatcgcttggagggtgtcggctttaaattggtatcagtagcaagagatgtttctgaaaaagaggttcccttgattggagaataccgttacagttcttctggtcaagtagggagaactctctatactgataaaaatggagagatttttgtgacaaatcttcctcttgggaactatcgtttcaaggaggtggagccactggcaggctatgctgttacgacgctggatacggatgtccagctggtagatcatcagctggtgacgattacggttgtcaatcagaaattaccacgtggcaatgttgactttatgaaggtggatggtcggaccaatacctctcttcaaggggcaatgttcaaagtcatgaaagaagaaagcggacactatactcctgttcttcaaaatggtaaggaagtagttgtaacatcagggaaagatggtcgtttccgagtggaaggtctagagtatgggacatactatttatgggagctccaagctccaactggttatgttcaattaacatcgcctgtttcctttacaatcgggaaagatactcgtaaggaactggtaacagtggttaaaaataacaagcgaccacggattgatgtgccagatacaggggaagaaaccttgtatatcttgatgcttgttgccattttgttgtttggtagtggttattatcttacgaaaaaaccaaataactgatattcaatgtacatcattatgaaaaagatagcaggctgaagggaagaccagagtactctgaggtgatgttaatcaggaatcatggtgatgtggcatgaatcacaataacggatatgaggctgggcagattgtgccagcctcattgtgggttattgtttgtaaaacgataggactggtctggtaatcattttaggaatggacaggactgggattctgatttaaaatggatggtgaatcagaaagaaatgagattttctcgtttctcttagcagataggattgtctgttaggaaaagcgataaaatgatgagtttgaagataaagggatgctgataaaaatggtaaaaacaaaaaagcaaaaacgaaataatctcctattaggagtggtatttttcattggaatggcggtaatggcgtatccgctggtgtctcgcttgtattatcgagtggaatcaaatcaacaaattgctgactttgataaggaaaaagcaacgttggatgaggctgacattgatgaacgaatgaaattggcacaagccttcaatgactctttgaataatgtagtgagtggcgatccttggtcggaagaaatgaagaaaaaagggcgagcagagtatgcacgtatgttagaaatccatgagcggatggggcatgtggaaatccccgttattgacgtggatttgccggtttatgctggtactgctgaagaggtattgcagcaaggggctgggcatctagagggaacttctctgccgatcggaggcaattcgacccatgcggtgattacggcacatacaggtttgccaacagctaagatgtttacggatttgaccaaacttaaagttggggataagttttatgtgcacaatatcaaggaagtgatggcctatcaagtggatcaagtaaaggtgattgagccgacgaactttgatgatttattgattgtaccaggtcatgattatgtgaccttgctgacttgtacgccatacatgatcaatacccatcgtctattggttcgggggcatcggataccgtacgtagcagaggttgaggaagaatttattgcagcaaacaaactcagtcatctctatcgctacctgttttatgtggcagttggtttgattgtgattcttttatggattattcgacgcttgcgcaagaagaaaaaacaaccggaaaaggctttgaaggcgctgaaagcagcaaggaaggaagtgaaggtggaggatggacaacagtagacgttcacgaaaaaaaggcacaaaaaagaagaaacatccgctgatccttcttctgattttcttagtaggattcgccgttgcgatatatccattggtgtctcgttattattatcgtattgagtcaaacgaggttattaaagagtttgatgagacggtttcccagatggataaggcagaacttgaggagcgttggcgcttggctcaagccttcaatgcgaccttgaaaccatctgaaattcttgatccttttacagagcaagagaaaaagaaaggcgtctcagaatatgccaatatgctaaaggtccatgagcggattggctatgtggaaattcctgcgattgatcaggaaattccgatgtatgtcggaacgagtgaggacattcttcagaaaggggcagggctgttagaaggggcttcgctgcctgttggaggtgaaaatacccatacagtgatcactgctcacagaggattgccaacggcagaattgttcagtcaattggataagatgaaaaaaggggatatcttttatcttcacgttttagatcaggtgttggcctaccaagtggatcagatagtgacggtggagccgaatgactttgagcctgtcttgattcaacatggggaagattatgcgaccttgttgacttgtacaccgtatatgattaacagtcatcgtctgttggtacgtgggaagcggattccgtatacggcaccaattgcagagcggaatcgagcggtgagagagcgtgggcaattctggttgtggttattactaggagcgatggcggtcatccttctcttgctgtatcgcgtgtatcgtaatcgacggattgtcaaaggactagaaaagcaattggaggggcgtcatgtcaaggactaaactacgagccttattgggatacttgttgatgttggtagcctgtttgattcctatttattgttttggacagatggtgttgcagtctcttggacaggtgaaaggtcatgctacatttgtgaaatccatgacaactgaaatgtaccaagaacaacagaaccattctctcgcctacaatcaacgcttggcttcgcaaaatcgcattgtagatccttttttggcggagggatatgaggtcaattaccaagtgtctgacgaccctgatgcagtctatggttacttgtctattccaagtttggaaatcatggagccggtttatttgggagcagattatcatcatttagggatgggcttggctcatgtggatggtacaccgctgcctctggatggtacagggattcgctcagtgattgctgggcaccgtgcagagccaagccatgtctttttccgccatttggatcagctaaaagttggagatgctctttattatgataatggccaggaaattgtagaatatcagatgatggacacagagattattttaccgtcggaatgggaaaaattagaatcggttagctctaaaaatatcatgaccttgataacctgcgatccgattcctacctttaataaacgcttattagtgaattttgaacgagtcgctgtttatcaaaaatcagatccacaaacagctgcagttgcgagggttgcttttacgaaagaaggacaatctgtatcgcgtgttgcaacctctcaatggttgtaccgtgggctagtggtactggcatttctgggaatcctgtttgttttgtggaagctagcacgtttactacgagggaaataaaaagaaatgaaaggaaagctaaggctgttcctttttccggctctttgtcaactgtagtgg

SEQ ID NO: 694 - DNA, 11369 bp, Streptococcus pneumoniae
gcgcttttcattataagtcttatgggacttttttgatactcaaaaagccctataatctccacagtgggatttacccactacagaaattatagagccagaaaaaacacttttgttcactagcagaaactagagagcagaagtgtttttctgttcagatttacccaaaactgggaaatatggggataagaatagagatggcttaggaagcccctttttgtgtgtagacagtacgatgaacttataacaaatagtgagcctttttagcaatcattgcgacccgtttgtcaaaagcctcttttcggatatctacaattgtctgatagatgagacgctgttggctaacatgcaaatctaaggcaatcgtcaaaaagtgatgtttccctttgggatactgctttttaacgtaaggcaggtattctttcgttgtaataataatcaatggctctgtcaaatgctcctctgaaggaggaggactaattagaatattgtatcctgtaacagaggcaactttgtcagtaaaattccgtaaaataatggactttattaagtttacatctgcttgattatttaaaatgataaaaatcgggatagcaggtagtgaggaaaagatggtttctgtcaagtagagtgagaaaaggtacagccgatgctggtcgataactccttcaatcttctgctcagtcatccactcttgaacaattgctttcgaaatatgatacagtggcttgtcgctttcaatcccataatgttcgtaataattataatagggaactagattttgtaaaccaaacaaaaacgttcttgttaagaaagtcagtgctgttaaaaaagaaagagaattcgaaatgtcatttcctaagatattcttgaacttggatagtagatgctttcctcttgtatgctgaagaatcagttgaatagtatgagtctttttttcttgattccatttgtccttggaaaacgaagaattagcagaacaataaaccaaaaagatataatccagttcttcctgagtaaaagtcatgttggcatgtggctctaagtaagtttggcaatgttccatcaaaatcggatacataaagaggttttttaatttttcaaactctttggactcagggaactcaagtggaaattcccgacgtttccaagtgagtgccactagtatgctaaaatgaacatactcgtcaggtgtgatttctaacagttcatgactgagttgagaattagactgcacaatcatatgtgtgacccaatccatacttccatcattcaaatcataaatctcaataccaaaatgaaactggaggagtgcaattaaaaaacgaatgcgatattcaggaccaactacttgatttttcacaaggtccaaacctactgaacgtagtaacaagccacacttttgtcgtacgcggtagcctgttgcgatggaaatatactctttttgtgtaaattcgttaaagctttgattaccttgtagtagaaagaagcggagtatttttaaaatagttgattggttataaagctgatggaagtaataattcgtttgatgagaatggtgttcgattaattgaacttgttgcgtatctaaattaaatgtcaactcttcctcgaatgtttcttgtaattcctgcaaaatgcttaggagacttttagattgtaatgaagttaaagtagacagttcatctagttcaatagaccgaatatccaataatatatttaaaatggtaattttatctgtaattcttttttcaatgtatttgtttagcatagttaccgaatcttagttgcatatagataattttaattattataatacaaaagaaactaattgtcttgtcaaaaaggttgtggaatttccgactttattgataaaacagcatgtaataaaaggcattttaaagatagtaatgagtattggtggagttttatggcttattttttttattagaaaatatttttttatcaaatattgtcgttctataaaaaaatatgtgataaaaatatctattgtgatggaagttgttttaatttatactaggatagttaatagtaatactatactatattgtatacaagtgtgtcattgccaggttgagaagatagctataacgcacttttatacgcttttgctacgtttgttagtgaacggattaactcagtgagataaattttatcagaacataagtaatccgtttcttcgtgtatacagattgaaagtacctatgaatcatagaaggattaacttgttctatgaataatgcttaacagggagacacacatgaaaaaagtaagaaagatatttcagaaggcagttgcaggactgtgctgtatatctcagttgacagctttttcttcgatagttgctttagcagaaacgcctgaaaccagtccagcgataggaaaagtagtgattaaggagacaggcgaaggaggagcgcttctaggagatgccgtctttgagttgaaaaacaatacggatggcacaactgtttcgcaaaggacagaggcgcaaacaggagaagcgatattttcaaacataaaacctgggacatacaccttgacagaagcccaacctccagttggttataaaccctctactaaacaatggactgttgaagttgagaagaatggtcggacgactgtccaaggtgaacaggtagaaaatcgagaagaggctctatctgaccagtatccacaaacagggacttatccagatgttcaaacaccttatcagattattaaggtagatggttcggaaaaaaacggacagcacaaggcgttgaatccgaatccatatgaacgtgtgattccagaaggtacactttcaaagagaatttatcaagtgaataatttggatgataaccaatatggaatcgaattgacggttagtgggaaaacagtgtatgaacaaaaagataagtctgtgccgctggatgtcgttatcttgctcgataactcaaatagtatgagtaacattcgaaacaagaatgctcgacgtgcggaaagagctggtgaggcgacacgttctcttattgataaaattacatctgatccagaaaatagggtagcgcttgtgacttatgcttccactatctttgatgggaccgagtttacagtagaaaaaggggtagcagataaaaacggaaaacgattgaatgattctcttttttggaattatgatcagacgagttttacaaccaataccaaagattatagttatttaaagctgactaatgataagaatgacattgtagaattaaaaaataaggtacctaccgaggcagaagaccatgatggaaatagattgatgtaccaattcggtgccacttttactcagaaagctttgatgaaggcagatgagattttgacacaacaagcgagacaaaatagtcaaaaagtcattttccatattacggatggtgtcccaactatgtcgtatccgattaattttaatcatgctacgtttgctccatcatatcaaaatcaactaaatgcattttttagtaaatctcctaataaagatggaatactattaagtgattttattacgcaagcaactagtggagaacatacaattgtacgcggagatgggcaaagttaccagatgtttacagataagacagtttatgaaaaaggtgctcctgcagctttcccagttaaacctgaaaaatattctgaaatgaaggcggctggttatgcagttataggcgatccaattaatggtggatatatttggcttaattggagagagagtattctggcttatccgtttaattctaatactgctaaaattaccaatcatggtgaccctacaagatggtactataacgggaatattgctcctgatgggtatgatgtctttacggtaggtattggtattaacggagatcctggtacggatgaagcaacggctactagttttatgcaaagtatttctagtaaacctgaaaactataccaatgttactgacacgacaaaaatattggaacagttgaatcgttatttccacaccatcgtaactgaaaagaaatcaattgagaatggtacgattacagatccgatgggtgagttaattgatttgcaattgggcacagatggaagatttgatccagcagattacactttaactgcaaacgatggtagtcgcttggagaatggacaagctgtaggtggtccacaaaatgatggtggtttgttaaaaaatgcaaaagtgctctatgatacgactgagaaaaggattcgtgtaacaggtctgtaccttggaacggatgaaaaagttacgttgacctacaatgttcgtttgaatgatgagtttgtaagcaataaattttatgataccaatggtcgaacaaccttacatcctaaggaagtagaacagaacacagtgcgcgacttcccgattcctaagattcgtgatgtgcggaagtatccagaaatcacaatttcaaaagagaaaaaacttggtgacattgagtttattaaggtcaataaaaatgataaaaaaccactgagagatgcggtctttagtcttcaaaaacaacatccggattatccagatatttatggagctattgatcaaaatggcacttatcaaaatgtgagaacaggtgaagatggtaagttgacctttaaaaatctgtcagatgggaaatatcgattatttgaaaattctgaaccagctggttataaacccgttcaaaataagcctatcgttgccttccaaatagtaaatggagaagtcagagatgtgacttcaatcgttccacaagatataccagcgggttacgagtttacgaatgataagcactatattaccaatgaacctattcctccaaagagagaatatcctcgaactggtggtatcggaatgttgccattctatctgataggttgcatgatgatgggaggagttctattatacacacggaaacatccgtaaagtgtagaaatgataatatctatgttctgaacgatacttttaagaagtagcactcaagaagagatttaagtttacttggtgaaacctgttttattcgtaagtaaactatcattgaaaggggagatgttttcgaaaacttgcacagaaaaaggattattattgtcatgtgtaattcattacattgctcacagttgattttaagagatatgaataaggagaaatcatgaaatcaatcaacaaatttttaacaatacttgctgccttattactgacagtgagtagcctgttctcagctgcaacagtttttgcggcggaacaaaaaactaagacacttacagttcataaattattgatgacagatcaagagcttgacgcttggaattctgatgcgattactactgcaggttatgacggttcgcaaaattttgaacagttcaaacaacttcaaggtgttccacaaggagtaaccgaaatctctggtgttgcattcgagttacagagttatacgggtcctcaaggaaaagaacaagaaaatttaacgaatgatgcggtttggactgcggttaataaaggtgtgacgactgaaacaggtgttaaatttgatactgaagttttacaagggacatatcgtcttgtcgaagtacgtaaagaatcgacttatgtcggtccaaatggtaaagttttaacaggtatgaaagctgttcctgctttaattactctgccgcttgtaaaccaaaatggtgttgtagaaaatgcacatgtctatccaaagaattctgaagacaaacctacagcaacgaaaacatttgatactgcagcaggtttcgtagatccaggtgaaaaaggtttagcaattggcactaaggtaccgtatattgttacaacaactattccgaaaaactcaactcttgcaacagctttctggtcagatgaaatgacagaaggtctagattataatggtgatgtagttgttaattataatggtcaaccgcttgataattctcattacacattagaagcaggtcataatggctttatcttgaagttaaatgaaaaaggtctggaagcaatcaacggtaaagatgcagaagcaacaattacgttgaagtatactgcaactttaaatgctcttgctgttgctgatgtgccagaagcgaatgatgtaacattccattatggaaacaacccaggtcatggtaacactccaaaaccaaacaaacctaaaaacggtgaacttacaattactaaaacatgggctgatgctaaagatgctcctatagcaggtgtagaagtaacttttgatttggtaaatgctcagacaggtgaggtcgttaaagtacctggacatgaaacaggtattgtattgaatcaaacaaataattggacatttactgctacaggtcttgataataatacagaatataaatttgttgaacggacaattaagggatattctgcagattaccaaacaattactgaaacaggaaaaattgctgttaaaaactggaaagatgaaaatccagaaccaataaatcctgaagagccacgtgtaaaaacatatggtaaaaaattcgttaaggttgaccaaaaagacgaacgcttaaaagaagcacaattcgttgtgaagaatgagcaagggaaatatcttgcactcaaatctgcagcacaacaagctgtaaatgagaaagctgccgcagaagcgaaacaagcgctagatgcagcgatagcagcctatacaaatgctgcagataaaaatgcagcacaagctgtagtagatgctgcgcaaaaaacatataatgacaattacagagcagctagatttggctatgtagaagtagagagaaaagaagatgcgttagttcttacttctaacactgatggtcaattccaaatttcaggtcttgctgctggaagctacacgttggaagaaacaaaagctccagaaggctttgcaaaacttggagatgtgaagtttgaggttggagcaggttcttggaatcaaggtgatttcaattatttaaaagatgttcagaagaacgacgctacaaaagtagtcaacaaaaaaatcacgatccctcaaacgggtggtattggtacaattatctttgctgtagcgggggctgtgattatgggtattgcagtgtacgcatatgttaaaaacaacaaagatgaggatcaacttgcttaagtaagagagaaaggagccattgatgacaatgcagaaaatgcagaaaatgattagtcgtatcttctttgttatggctctgtgtttttctcttgtatggggtgcacatgcagtccaagcgcaagaagatcacacgttggtcttgcaattggagaactatcaggaggtggttagtcaattgccatctcgtgatggtcatcggttgcaggtatggaagttggatgattcgtattcctatgataatcgggtgcaaattgtgagagacttgcattcgtgggatgagaataaactttcttctttcaaaaagacttcgtttgagatgaccttccttgagaatcagattgaagtatctcatattccaaatggtctttactatgttcgctctattatccagacggatgcggtttcttatccagctgaatttctttttgaaatgacagatcagacggtagagcctttggtcattgtagcgaaaaaagcagatacggtgacaacaaaggtgaagctgataaaggtggatcaagaccacaatcgcttggagggtgtcggctttaaattggtatcagtagcaagagatggttctgaaaaagaggttcccttgattggagaataccgttacagttcttctggtcaagtagggagaactctctatactgataaaaatggagagattgttgtgacaaatcttcctcttgggacctatcgtttcaaggaggtggagccactggcaggctatactgttacgacgatggatacggatgtccagttggtagatcatcagctggtgacgattacggttgtcaatcagaaattaccacgtggcaatgttgactttatgaaggtggatggtcggaccaatacctctcttcaaggggcaatgttcaaagtcatgaaagaagaaaacggacactatactcctgttcttcaaaatggtaaggaagtagttgtggcatcagggaaagatggtcgtttccgagtggaaggtctagagtatgggacatactatttatgggagctccaagctccaactggttatgttcaattaacatcgcctgtttcctttacaatcgggaaagatactcgtaaggaactggtaacagtggttaaaaataacaagcgaccacggattgatgtgccagatacaggggaagaaaccttgtatatcttgatgcttgttgccattttgttgtttggtagtggctattatcttacgaaaaaaacaaataactgatattcaatgtacatcattatgaaaaagatagcaggctgaagggaagaccagagtactctgaggtgatgttaatcaggaatcatggtgatttggcatgaatcacaataacggatatgaggctgggcagattgtgccagcctcattgtgggttattgtttgtaaaacgataggactggtctggtaatcattttaggaatggacaggactgggattctgatttaaaatggatggtgaatcagaaagaaatgagattttctcgtttctcttagcagataggattgtctgttaggaaaagcgataaaatgatgagtttgaagataaagggatgctgataaaaatggtaaaaacaaaaaagcaaaaacgaaataatctcctattaggagtggtatttttcattggaatggcggtaatggcgtatccgctggtgtctcgcttgtattatcgagtggaatcaaatcaacaaattgctgactttgataaggaaaaagcaacgttggatgaggctgacattgatgaacgaatgaaattggcacaagccttcaatgactctttgaataatgtagtgagtggcgatccttggtcggaagaaatgaagaaaaaagggcgagcagagtatgcacgtatgttagaaatccatgagcggatggggcatgtggaaatccccgttattgacgtggatttgccggtttatgctggtactgctgaagaggtattgcagcaaggggctgggcagctagagggaacttctctgccgatcggaggcaattcgacccatgcggtgattacggcacatacaggtttgccaacagctaagatgtttacggatttgaccaaacttaaagttggggataagttttatgtgcacaatatcaaggaagtgatggcctatcaagtggatcaagtaaaggtgattgagccgacgaactttgatgatttattgattgtaccaggtcatgattatgtgaccttgctgacttgtacgccatacatgatcaatacccatcgtctattggttcgggggcatcggataccgtacgtagcagaggttgaggaagaatttattgcagcaaacaaactcagtcatctctatcgctacctgttttatgtggcagttggtttgattgtgattcttttatggattattcgacgcttgcgcaagaagaaaaaacaaccggaaaaggctttgaaggcgctgaaagcagcaaggaaggaagtgaaggtggaggatggacaacagtagacgttcacgaaaaaaaggcacaaaaaagaagaaacatccgctgatccttcttctgattttcttagtaggattcgccgttgcgatatatccattggtgtctcgttattattatcgtattgagtcaaacgaggttattaaagagtttgatgagacggtttcccagatggataaggcagaacttgaggagcgttggcgcttggctcaagccttcaatgcgaccttgaaaccatctgaaattcttgatccttttacagagcaagagaaaaagaaaggcgtctcagaatatgccaatatgctaaaggtccatgagcggattggctatgtggaaattcctgcgattgatcaggaaattccgatgtatgtcggaacgagtgaggaaattcttcagaagggcgcaggattgctagagggagcttcgttaccggttggtggtgaaaatacccacacagttgttactgctcatagaggattaccgacggcagaactgtttagtcaattggataagatgaaaaaaggggatgtcttttatcttcacgttttagaccaggtgttggcctaccaagtggatcagattttgacggttgagccaaatgactttgagcctgtcttgattcaacatgggaaagattatgcgaccttgttgacctgtacaccgtatatgattaacagtcatcgtctgttggtacgtgggaagcggattccgtatacggcaccaattgcagagcgaaatcgagcggtgagagagcgtgggcaattctggttgtggttattgctagcggcgttggttatgattctggtattgagttacggggtgtatcgtcatcgtcgcattgtcaaagggctagaaaaacaattggaggagcatcatgtcaaaggctaagctacagaaattactagggtatttgctgatgctggtagcattggtgattcctgtttattgttttgggcagatggtgttacagtctttaggacaagtaaaaggtcatgagatattttcagaatctgtgacggccgacagttaccaagagcaattgcaacggtcgcttgattacaatcaacgcttggattcgcaaaatcgtattgtagatccttttttggcggaagggtatgaggtaaattaccaagtgtctgacgatcctgatgcagtctacggctatttgtcgattccgagtttggaaatcatggagccagtttatctaggagcggattaccatcatttagcaatggggttggcccatgtggatgggacgcctcttcctgttgagggaaaagggattcgttcagtgattgctgggcaccgtgcagaaccaagccatgtctttttccgccatttggatcagctaaaagttggagatgctctttattatgataatggccaggaaattgtagaatatcagatgatggacacagagattattttaccgtcggaatgggaaaaattagaatcggttagctctaaaaatatcatgaccttgataacctgcgatccgattcctacctttaataaacgcttattagtgaattttgaacgagtcgctgtttatcaaaaatcagatccacaaacagctgcagttgcgagggttgcttttacgaaagaaggacaatctgtatcgcgtgttgcaacctctcaatggttgtaccgtgggctagtggtactggcatttctgggaatcctgtttgttttgtggaagctagcacgtttactacgagggaaataaaaagaaatgaaaggaaagctaaggctgttcctttttccggctctttgtcaactgta

SEQ ID NO: 695 - DNA, 383 bp, Streptococcus pneumoniae
ttgatagaccgccttcattatcatttctagaatttttctttaggtttgtaaagactacaaaataaaatgatgaaaacaactatcttgtggatacactaaaaagacacgctaattagcaaactctctcttcatcatctctcaccattattatactactatttatatgacaaataaaggtgattttgttaaaatataactttgaaaatccacatatatttttaatcttccgtctgaaaaaataaataaaaatagtaaaaataaacacgaatttaaaataagcaaattttttaagaaaatctgtgctaaactttaatagttttgtgcttaataataatcagcacttacaaagaacaaagggaaaagcgaggagagaacttttaatg

SEQ ID NO: 696 - DNA, 35 bp, Streptococcus pneumoniae
agtcagtctctagacggcacaataggagttgtaaa

SEQ ID NO: 697 - DNA, 37 bp, Streptococcus
cacctgtcatagatcttaagaatactaaagcgcataa

SEQ ID NO: 698 - DNA, 36 bp, Streptococcus
agtcagtccttaagccgcatattattaatcatgttg

SEQ ID NO: 699 - DNA, 35 bp, Streptococcus
agtcagtcctcgagttaaacttcctctgattgacg

SEQ ID NO: 700 - DNA, 34 bp, Streptococcus
agtcagtccttaagaaggagtggtgctgcggtaa

SEQ ID NO: 701 - DNA, 35 bp, Streptococcus
agtcagtcctcgagttaagcttcctctgattgacg

SEQ ID NO: 702 - DNA, 24 bp, Streptococcus
ctagtgatatatctagagaaaaag

SEQ ID NO: 703 - DNA, 39 bp, Streptococcus
ctagctagtcgcgactttttcatttttgatttccctttc

SEQ ID NO: 704 - protein, 1309 aa, Streptococcus
MRKYQKFSKILTLSLFCLSQIPLNTNVLGESTVPENGAKGKLVVKKTDDQNKPLSKATFVLKTTAHPESKIEKVTAELTGEATFDNLIPGDYTLSEETAPEGYKKTNQTWQVKVESNGKTTIQNSGDKNSTIGQNQEELDKQYPPTGIYEDTKESYKLEHVKGSVPNGKSEAKAVNPYSSEGEHIREIPEGTLSKRISEVGDLAHNKYKIELTVSGKTIVKPVDKQKPLETDTTWTARTVSEVKADLVKQDNKSSYTVKYGDTLSVISEAMSIDMNVLAKINNIADINLIYPETTLTVTYDQKSHTATSMKIETPATNAAGQTTATVDLKTNQVSVADQKVSLNTISEGMTPEAATTIVSPMKTYSSAPALKSKEVLAQEQAVSQAAANEQVSPAPVKSITSEVPAAKEEVKPTQTSVSQSTTVSPASVAAETPAPVAKVAPVRTVAAPRVASVKVVTPKVETGASPEHVSAPAVPVTTTSPATDSKLQATEVKSVPVAQKAPTATPVAQPASTTNAVAAHPENAGLQPHVAAYKEKVASTYGVNEFSTYRAGDPGDHGKGLAVDFIVGTNQALGNKVAQYSTQNMAANNISYVIWQQKFYSNTNSIYGPANTWNAMPDRGGVTANHYDHVHVSFNKDVVFVLDNSNSMNNDGPNFQRHNKAKKAAEALGTAVKDILGANSDNRVALVTYGSDIFDGRSVDVVKGFKEDDKYYGLQTKFTIQTENYSHKQLTNNAEEIIKRIPTEAPKAKWGSTTNGLTPEQQKEYYLSKVGETFTMKAFMEADDILSQVNRNSQKIIVHVTDGVPTRSYAINNFKLGASYESQFEQMKKNGYLNKSNFLLTDKPDDIKGNGESYFLFPLDSYQTQIISGNLQKLHYLDLNLNYPKGTIYRNGPVKEHGTPTKLYINSLKQKNYDIFNFGIDISGFRQVYNEEYKKNQDGTFQKLKEEAFKLSDGEITELMRSFSSKPEYYTPIVTSADTSNNEILSKIQQQFETILTKENSIVNGTIEDPMGDKINLQLGNGQILQPSDYTLQGNDGSVMKDGIATGGPNNDGGILKGVKLEYIGNKLYVRGLNLGEGQKVTLTYDVKLDDSFISNKFYDTNGRTTLNPKSEDPNTLRDFPIPKIRDVREYPTITIKNEKKLGEIEFIKVDKDNNKLLLKGATFELQEFNEDYKLYLPIKNNNSKVVTGENGKISYKDLKDGKYQLIEAVSPEDYQKITNKPILTFEVVKGSIKNIIAVNKQISEYHEEGDKHLITNTHIPPKGIIPKTGGKGILSFILIGGAMMSIAGGIYIWKRYKKSSDMSIKKD

SEQ ID NO: 705 - protein, 1095 aa, Streptococcus
MRKYQKFSKILTLSLFCLSQIPLNTNVLGESTVPENGAKGKLVVKKTDDQNKPLSKATFVLKTTAHPESKIEKVTAELTGEATFDNLIPGDYTLSEETAPEGYKKTNQTWQVKVESNGKTTIQNSGDKNSTIGQNQEELDKQYPPTGIYEDTKESYKLEHVKGSVPNGKSEAKAVNPYSSEGEHIREIPEGTLSKRISEVGDLAHNKYKIELTVSGKTIVKPVDKQKPLETDTTWTARTVSEVKADLVKQDNKSSYTVKYGDTLSVISEAMSIDMNVLAKINNIADINLIYPETTLTVTYDQKSHTATSMKIETPATNAAGQTTATVDLKTNQVSVADQKVSLNTISEGMTPEAATTIVSPMKTYSSAPALKSKEVLAQEQAVSQAAANEQVSPAPVKSITSEVPAAKEEVKPTQTSVSQSTTVSPASVAAETPAPVAKVAPVRTVAAPRVASVKVVTPKVETGASPEHVSAPAVPVTTTSPATDSKLQATEVKSVPVAQKAPTATPVAQPASTTNAVAAHPENAGLQPHVAAYKEKVASTYGVNEFSTYRAGDPGDHGKGLAVDFIVGTNQALGNKVAQYSTQNMAANNISYVIWQQKFYSNTNSIYGPANTWNAMPDRGGVTANHYDHVHVSFNKGESYFLFPLDSYQTQIISGNLQKLHYLDLNLNYPKGTIYRNGPVKEHGTPTKLYINSLKQKNYDIFNFGIDISGFRQVYNEEYKKNQDGTFQKLKEEAFKLSDGEITELMRSFSSKPEYYTPIVTSADTSNNEILSKIQQQFETILTKENSIVNGTIEDPMGDKINLQLGNGQILQPSDYTLQGNDGSVMKDGIATGGPNNDGGILKGVKLEYIGNKLYVRGLNLGEGQKVTLTYDVKLDDSFISNKFYDTNGRTTLNPKSEDPNTLRDFPIPKIRDVREYPTITIKNEKKLGEIEFIKVDKDNNKLLLKGATFELQEFNEDYKLYLPIKNNNSKVVTGENGKISYKDLKDGKYQLIEAVSPEDYQKITNKPILTFEVVKGSIKNIIAVNKQISEYHEEGDKHLITNTHIPPKGIIPKTGGKGILSFILIGGAMMSIAGGIYIWKRYKKSSDMSIKKD

SEQ ID NO: 706 - DNA, 35 bp, Streptococcus; identical to SEQ ID NO: 696

SEQ ID NO: 707 - DNA, 40 bp, Streptococcus
ccacgtcgtatctgtttctaacggcttttgtttgtccact

SEQ ID NO: 708 - DNA, 40 bp, Streptococcus
gacaaacaaaagccgttagaaacagatacgacgtggacag

SEQ ID NO: 709 - DNA, 40 bp, Streptococcus
gagtacgaagacaacatctttgttaaatgatacgtgaacg

SEQ ID NO: 710 - DNA, 40 bp, Streptococcus
taaaaagtaactctcccctttgttaaatgatacgtgaacg

SEQ ID NO: 711 - DNA, 39 bp, Streptococcus
cacgtatcatttaacaaagatgttgtcttcgtactcgat

SEQ ID NO: 712 - DNA, 41 bp, Streptococcus
cacgtatcatttaacaaaggggagagttactttttatttcc

SEQ ID NO: 713 - DNA, 37 bp, Streptococcus; identical to SEQ ID NO: 697

SEQ ID NO: 714 - protein, 711 aa, Streptococcus
MKMNKKVLLTSTMAASLLSVASVQAQETDTTWTARTVSEVKADLVKQDNKSSYTVKYGDTLSVISEAMSIDMNVLAKINNIADINLIYPETTLTVTYDQKSHTATSMKIETPATNAAGQTTATVDLKTNQVSVADQKVSLNTISEGMTPEAATTIVSPMKTYSSAPALKSKEVLAQEQAVSQAAANEQVSPAPVKSITSEVPAAKEEVKPTQTSVSQSTTVSPASVAAETPAPVAKVAPVRTVAAPRVASVKVVTPKVETGASPEHVSAPAVPVTTTSPATDSKLQATEVKSVPVAQKAPTATPVAQPASTTNAVAAHPENAGLQPHVAAYKEKVASTYGVNEFSTYRAGDPGDHGKGLAVDFIVGTNQALGNKVAQYSTQNMAANNISYVIWQQKFYSNTNSIYGPANTWNAMPDRGGVTANHYDHVHVSFNKHQLTIVHLEARDIDRPNPQLEIAPKEGTPIEGVLYQLYQLKSTEDGDLLAHWNSLTITELKKQAQQVFEATTNQQGKATFNQLPDGIYYGLAVKAGEKNRNVSAFLVDLSEDKVIYPKIIWSTGELDLLKVGVDGDTKKPLAGVVFELYEKNGRTPIRVKNGVHSQDIDAAKHLETDSSGHIRISGLIHGDYVLKEIETQSGYQIGQAETAVTIEKSKTVTVTIENKKVPTPKVPSRGGLIPKTGEQQAMALVIIGGILIALALRLLSKHRKHQNKD

SEQ ID NO: 715 - protein, 637 aa, Streptococcus
MKMNKKVLLTSTMAASLLSVASVQAQETDTTWTARTVSEVKADLVKQDNKSSYTVKYGDTLSVISEAMSIDMNVLAKINNIADINLIYPETTLTVTYDQKSHTATSMKIETPATNAAGQTTATVDLKTNQVSVADQKVSLNTISEGMTPEAATTIVSPMKTYSSAPALKSKEVLAQEQAVSQAAANEQVSPAPVKSITSEVPAAKEEVKPTQTSVSQSTTVSPASVAAETPAPVAKVAPVRTVAAPRVASVKVVTPKVETGASPEHVSAPAVPVTTTSPATDSKLQATEVKSVPVAQKAPTATPVAQPASTTNAVAAHPENAGLQPHVAAYKEKVASTYGVNEFSTYRAGDPGDHGKGLAVDFIVGTNQALGNKVAQYSTQNMAANNISYVIWQQKFYSNTNSIYGPANTWNAMPDRGGVTANHYDHVHVSFNKQGKATFNQLPDGIYYGLAVKAGEKNRNVSAFLVDLSEDKVIYPKIIWSTGELDLLKVGVDGDTKKPLAGVVFELYEKNGRTPIRVKNGVHSQDIDAAKHLETDSSGHIRISGLIHGDYVLKEIETQSGYQIGQAETAVTIEKSKTVTVTIENKKVPTPKVPSRGGLIPKTGEQQAMALVIIGGILIALALRLLSKHRKHQNKD

SEQ ID NO: 716 - protein, 6 aa, Streptococcus
VVPTGV

SEQ ID NO: 717 - protein, 6 aa, Streptococcus
EVPTGV

SEQ ID NO: 718 - protein, 6 aa, Streptococcus
LPSTGE

SEQ ID NO: 719 - protein, 6 aa, Streptococcus
VPPTGL

SEQ ID NO: 720 - protein, 6 aa, Streptococcus
QVPTGV

SEQ ID NO: 721 - protein, 6 aa, Streptococcus
LPLAGE

SEQ ID NO: 722 - protein, 6 aa, Streptococcus
LPATGE

SEQ ID NO: 723 - protein, 6 aa, Streptococcus
LPATGD

SEQ ID NO: 724 - protein, 6 aa, Streptococcus
VPPTGF

SEQ ID NO: 725 - protein, 6 aa, Streptococcus
QVPTGV

SEQ ID NO: 726 - protein, 6 aa, Streptococcus
LPLAGE

SEQ ID NO: 727 - protein, 6 aa, Streptococcus
LPATGE

SEQ ID NO: 728 - protein, 6 aa, Streptococcus
LPATGD

SEQ ID NO: 729 - protein, 6 aa, Streptococcus
LPSSGG

SEQ ID NO: 730 - protein, 6 aa, Streptococcus
LPSTGS

SEQ ID NO: 731 - DNA, 27 bp, Streptococcus
ctgtgctaaactttaatagttttgtgc

SEQ ID NO: 732 - DNA, 27 bp, Streptococcus
aggctatttctcttttcttaaacatgg

SEQ ID NO: 733 - DNA, 24 bp, Streptococcus
gtcaataacgatgttgtgaatggc

SEQ ID NO: 734 - DNA, 24 bp, Streptococcus
ctgacaatagggaaaggccaaaac

SEQ ID NO: 735 - DNA, 27 bp, Streptococcus
ccatgtttaagaaaagagaaatagcct

SEQ ID NO: 736 - DNA, 25 bp, Streptococcus
ggaaacccgctaagaaaattaaacg

SEQ ID NO: 737 - DNA, 24 bp, Streptococcus
ctatgatgtctattgcaggtggaa

SEQ ID NO: 738 - DNA, 22 bp, Streptococcus
gagtacttctactgaaataccc

SEQ ID NO: 739 - DNA, 26 bp, Streptococcus
ctaggatattctgtatctgatcttag

SEQ ID NO: 740 - DNA, 20 bp, Streptococcus
accgcagcaccactccattc

SEQ ID NO: 741 - DNA, 23 bp, Streptococcus
cctcttatcaatcctagttattc

SEQ ID NO: 742 - DNA, 20 bp, Streptococcus
ccctgccctgaagacaccta

SEQ ID NO: 743 - DNA, 24 bp, Streptococcus
tttagctttagctctaccatcagg

SEQ ID NO: 744 - DNA, 24 bp, Streptococcus
cccactgcaattatagtgacaagc

SEQ ID NO: 745 - DNA, 24 bp, Streptococcus
ttctttcagaatatggcctctagg

SEQ ID NO: 746 - DNA, 25 bp, Streptococcus
gccaacctgcatagactttaacatc

SEQ ID NO: 747 - DNA, 25 bp, Streptococcus
gatccgcttgataatacagagcttc

SEQ ID NO: 748 - DNA, 23 bp, Streptococcus
tcgccactaacagcgattgaatc

SEQ ID NO: 749 - DNA, 23 bp, Streptococcus
agaagtaactaggagagcacgtc

SEQ ID NO: 750 - DNA, 24 bp, Streptococcus
ccccaatagattccagaacttacc
